(19) United States
(12) Patent Application Publication
(10) Pub. No.: US 2023/0285549 A1
(43) Pub. Date: Sep. 14, 2023

(54) CD4+HELPER EPITOPES AND USES TO ENHANCE ANTIGEN-SPECIFIC IMMUNE RESPONSES

(71) Applicant: THE WISTAR INSTITUTE OF ANATOMY & BIOLOGY, Philadelphia, PA (US)

(72) Inventors: Ziyang XU, Philadelphia, PA (US); Daniel W. KULP, Morristown, NJ (US); David B. WEINER, Merion, PA (US)

(73) Assignee: THE WISTAR INSTITUTE OF ANATOMY & BIOLOGY, Philadelphia, PA (US)

(21) Appl. No.: 18/013,542

(22) PCT Filed: Jun. 30, 2021
(86) PCT No.: PCT/US21/40008

§ 371 Date: Dec. 28, 2022

Related U.S. Application Data
(60) Provisional application No. 63/046,687, filed on Jun. 30, 2020.

(51) Int. Cl. A61K 39/39; A61K 39/21; A61P 31/18

(52) U.S. Cl. CPC A61K 39/39; A61K 39/21; A61P 31/18; A61K 2039/55516

(57) ABSTRACT

Disclosed are compositions comprising an expressible nucleic acid sequence comprising a first nucleic acid sequence comprising a sequence that encodes an adjuvant polypeptide or a pharmaceutically acceptable salt thereof and a second nucleic acid sequence comprising a sequence that encodes an antigen from a virus or from a cancer. In some embodiments, the expressible nucleic acid sequence further comprises a nucleic acid sequence encoding at least one viral antigen or a pharmaceutically acceptable salt thereof. In some embodiments, the expressible nucleic acid sequence further comprises at least one nucleic acid sequence encoding a linker.

### BACKGROUND

[0001] Vaccination is an approach where antigenic materials are introduced into the hosts to elicit adaptive immune responses that may confer them with protection from subsequent pathogen exposure (Clem, 2011). Humoral immunity is an important branch of the adaptive immune system, in which antibodies produced by B cells serve either to directly neutralize targets on the pathogens through paratope-epitope interactions (Corti and Lanzavecchia, 2013; Kwong et al., 2013), or to indirectly mediate inactivation of the pathogens by engaging the complement system or effector cells such as macrophages and natural killer cells through Fc-dependent mechanisms (Kurdi et al., 2018; Seidel et al., 2013; van Erp et al., 2019). Antibody responses serve as an important correlate for protection for many emerging and re-emerging infectious diseases, including but not limited to HIV-1 (Burton and Hangartner, 2016), influenza (Laursen et al., 2018), and coronaviruses (Jiang et al., 2020). A strategy to enhance humoral responses induced by vaccination is, therefore, of great significance.

[0002] CD4+ T cells, particularly T-follicular helper (Tfh) cells, play a critical role in the maturation of antibody responses (Crotty, 2014). In the germinal center, immunological synapses are formed between Tfh and Germinal Center B (GCB) cells through interactions of pairs of adhesion molecules such as LFA1-ICAM-1 and SAP-Ly108 to enable transfer of soluble cytokines, such as IL-4 and IL-21, from Tfh to GCB cells and promote ligand-receptor interaction, such as CD40L-CD40 binding, to enhance survival, differentiation, somatic hypermutation, and class switching in the GCB cells (Carrasco et al., 2004; Elgueta et al., 2009; Flynn et al., 1998; Kageyama et al., 2012). Provision of T-cell help, however, is contingent upon Tfh activation by GCB cells through T-cell receptor (TCR) peptide-MHC II interaction (Zhang et al., 2013). As such, robust germinal center B-cell responses are dependent on presentation of MHC II-restricted epitope, derived from the antigen, by GCB to Tfh cells. However, different epitopes have varying affinity for binding to MHC-II receptors depending on the hosts' haplotype such that peptide vaccines as well as smaller protein domains may not intrinsically contain a potent CD4+ helper epitope to drive germinal center responses (Elbahnasawy et al., 2018; Falugi et al., 2001; Pichichero, 2013). Such is the rationale for conjugating peptide and carbohydrate vaccines to protein carriers, like Keyhole limpet hemocyanin (KLH) (Ragupathi et al., 2002), tetanus toxin (Diethelm-Okita et al., 2000), or hepatitis B-surface antigen (HbsAg) (Collins et al., 2017). However, these large protein carriers may contain irrelevant immunodominant surfaces which may skew induced antibody responses away from the desired epitopes, creating additional uncertainties and challenges to this approach (Ghosh et al., 2013; Valea et al., 2018; Xu and Kulp, 2019).

[0003] Direct incorporation and fusion of a potent CD4+ helper epitope with the target antigen may be a simpler and more effective strategy to enhance the induced humoral immunity. Several important epitopes have been identified in this manner. Incorporation of Pan DR epitope (PADRE), for example, has demonstrated to improve immunogenicity of peptide and protein vaccines in animal studies and it has also been explored in several clinical studies (Alexander et al., 2000; Ghaffari-Nazari et al., 2015; Snook et al., 2019). Identification of additional potent CD4-helper epitopes can create new tools to be used in conjunction with, or as alternative to, these established CD4-helper epitopes as molecular adjuvants to various vaccine antigens.

### SUMMARY OF EMBODIMENTS

[0004] The present invention relates to a novel CD4+ helper epitope. In particular, the present invention relates to a composition comprising an expressible nucleic acid sequence encoding an adjuvant peptide comprising an HLA I-Ab epitope from Aquifex aeolicus or a functional fragment thereof, wherein the adjuvant peptide is no more than 20 amino acids, or in alternate embodiments, no more than about 15 amino acids in length. In certain embodiments, the present invention provides for an adjuvant peptide capable of binding HLA-DRB1*07:01, HLA-DRB1*15:01 and HLA-DRB5*01:01; or an adjuvant peptide comprising about 70%, 75%, 80%, 85%, 86%, 87%, 90%, 91%, 92, 93%, 94%, 95%, 96%, 97%, 98%, 99%, or 100% sequence identity to SEQ ID NO:1. In some embodiments, the disclosure relates to a pharmaceutical composition comprising a plasmid comprising a nucleic acid sequence encoding SEQ ID NO:1 or a variant thereof that is 70%, 75%, 80%, 85%, 86%, 87%, 90%, 91%, 92, 93%, 94%, 95%, 96%, 97%, 98%, 99%, or 100% sequence identity to SEQ ID NO: 1; and a pharmaceutically acceptable carrier.

[0005] In additional embodiments, the expressible nucleic acid can comprise a nucleic acid sequence that encodes a viral antigen or a cancer antigen, and the viral antigen, in some embodiments, can in turn comprise a Coronaviridae antigen, Respiratory syncytial virus (RSV) antigen, or Influenza antigen. In certain embodiments, the Coronaviridae antigen can be from SARS-Cov-2 or a functional fragment thereof that comprises at least about 70%, 75%, 80%, 85%, 86%, 87%, 88%, 89%, 90%, 91%, 92, 93%, 94%, 95%, 96%, 97%, 98%, 99% sequence identity to any disclosed SARS-Cov-2 antigen disclosed herein. Likewise, in certain embodiments the Influenza antigen can be HA or a functional fragment thereof that comprises at least about 70%, 75%, 80%, 85%, 86%, 87%, 90%, 91%, 92, 93%, 94%, 95%, 96%, 97%, 98%, 99% to any disclosed HA antigen disclosed herein. Finally, in certain embodiments the RSV antigen can be an amino acid sequence or a functional fragment thereof that comprises at least about 70%, 75%, 80%, 85%, 86%, 87%, 90%, 91%, 92, 93%, 94%, 95%, 96%, 97%, 98%, 99% to any disclosed RSV antigen disclosed herein.

[0006] In additional embodiments, the cancer antigen can comprise a breast cancer antigen, prostate cancer antigen, or a skin cancer antigen. In certain embodiments, the breast cancer antigen can be a HER2 or a functional fragment thereof that comprises at least about 70%, 75%, 80%, 85%, 86%, 87%, 90%, 91%, 92, 93%, 94%, 95%, 96%, 97%, 98%, 99%, 100% sequence identity to any disclosed breast cancer antigen disclosed herein. Likewise, in certain embodiments the prostate cancer antigen can be PSA or a functional fragment thereof that comprises at least about 70%, 75%, 80%, 85%, 86%, 87%, 90%, 91%, 92, 93%, 94%, 95%, 96%, 97%, 98%, 99% to any disclosed prostate antigen disclosed herein. Finally, in certain embodiments the skin cancer antigen can be an amino acid sequence or a functional fragment thereof that comprises at least about 70%, 75%, 80%, 85%, 86%, 87%, 90%, 91%, 92, 93%, 94%, 95%, 96%, 97%, 98%, 99% to any disclosed skin cancer antigen disclosed herein.

[0007] The present invention also relates to a composition comprising an amino acid sequence comprising an adjuvant peptide comprising an HLA I-Ab epitope from Aquifex aeolicus or a functional fragment thereof, wherein the adjuvant peptide can be no more than 20 amino acids, or in certain embodiments, no more than about 15 amino acids in length. In alternate embodiments, the adjuvant peptide can be capable of binding HLA-DRB1*07:01, HLA-DRB1*15:01 and HLA-DRB5*01:01, and in other embodiments, can comprise 70%, 75%, 80%, 85%, 86%, 87%, 90%, 91%, 92, 93%, 94%, 95%, 96%, 97%, 98%, 99% or 100% sequence identity to SEQ ID NO:1.

[0008] In alternate embodiments, the composition's amino acid sequence can further comprises a viral antigen and/or cancer antigen. In further embodiments, the amino acid sequence can comprise, from amino terminal to carboxy terminal orientation, the adjuvant peptide, a linker domain, and a viral and/or cancer antigen.

[0009] The present invention also relates to a pharmaceutical composition comprising: (i) any one or plurality of the nucleic acid sequences of described herein; and (ii) a pharmaceutically acceptable carrier.

[0010] In some embodiments, the disclosure relates methods of 1) inducing an immune response in a subject, 2) treating and/or preventing a viral infection or hyperproliferative disorder in a subject in need thereof, and 3) vaccinating a subject in need thereof, each by administering a therapeutically effective amount of the nucleic acid sequences or amino acid sequences as described herein. In some embodiments, the disclosed vaccine comprises a nucleic acid encoding an adjuvant disclosed herein, such as SEQ ID NO:1.

### BRIEF DESCRIPTION OF THE DRAWINGS

[0011] The accompanying drawings, which are incorporated in and constitute a part of this specification, illustrate several embodiments of the disclosed method and compositions and together with the description, serve to explain the principles of the disclosed method and compositions.

[0012] FIG. 1A-1G show evaluation of CD4+ T-cell responses to the nanoparticle structural domains induced by DNA vaccines. Mice received 25 μg DNA vaccination with EP twice three weeks apart and were euthanized two weeks post the second vaccination for cellular analysis. FIG. 1A: CD4+ T-cell IFNγ responses induced to the 3BVE, LS and PfV domains by DLnano_3BVE_GT8, DLnano_LS_GT8, and DLnano_PfV_GT8 vaccinations in BALB/c mice. FIG. 1B: Comparison of CD4+ cytokine responses to the LS domain induced by DLnano_LS_GT8 in BALB/c versus C57BL/6 mice. FIG. 1C: Comparison of polyfunctional CD4+ T-cell responses to the LS domain induced by DLnano_LS_GT8 in BALB/c versus C57BL/6 mice. FIG. 1D and FIG. 1E: Matrix mapping by IFNγ ELISpot assays (FIG. 1D) and ICS (FIG. 1E) to determine HLA I-Ad CD4+ T-cell epitopes in the LS domain in BALB/c mice immunized with DLnano_LS_GT8. FIG. 1F and FIG. 1G: Matrix mapping by IFNγ ELISpot assays (FIG. 1F) and ICS (FIG. 1G) to determine HLA I-Ab CD4+ T-cell epitopes in the LS domain in C57BL/6 mice immunized with DLnano_LS_GT8. Each group includes five mice; each dot represents an animal; error bar represents standard deviation; two-tailed Mann-Whitney Rank Test used to compare groups; p-values were adjusted for multiple comparison where appropriate; *, p-value<0.05.

[0013] FIG. 2A-2B shows in silico analysis using the SMM-align and NN-align to predict binding affinity, in terms of IC₅₀ value (nM), of the identified LS-3 (FIG. 2A), LS-13 and LS-15 (FIG. 2B) epitopes to common human and murine HLA alleles.

[0014] FIG. 3A-3F show analysis of the contributions of the identified LS-3 CD4-helper epitope to the antibody responses induced by DLnano_LS_GT8 in C57BL/6 mice. Mice received 25 μg DNA vaccination with EP twice three weeks apart and were euthanized two weeks post the second vaccination for cellular analysis. FIG. 3A: Engineering of CD4MutLS_GT8 mutants by selected mutations of the LS-3 epitope (in dark gray) that knocked out C57BL/6 HLA-IAb binding but still preserve assembly of the nanoparticle using structure-guided design, the remaining LS domain is shown in gray, the GT8 domain (light gray) is not shown. FIG. 3B: SEC-trace of lectin-column purified transfection supernatant of CD4MutLS_GT8 to determine the assembly status of designed CD4MutLS_GT8. FIG. 3C: Characterization of binding of recombinantly produced CD4MutLS_GT8, eOD-GT8-60mer and GT8-mono to VRC01 by ELISA. FIG. 3D and FIG. 3E: Cytokine expression by the ICS assay in C57BL/6 mice immunized with either DLnano_LS_GT8 or DLnano_CD4MutLS_GT8 to confirm knockout of the dominant LS-3 CD4+ helper epitope in CD4MutLS_GT8. FIG. 3F: Humoral responses to GT8 for mice immunized with DLnano_CD4MutLS_GT8, DLnano_LS_GT8 or DLmono_GT8 seven d.p.i. Each group includes five mice; each dot represents a mouse; error bar represents standard deviation; two-tailed Mann-Whitney Rank Test used to compare groups; p-values were adjusted for multiple comparison where appropriate; *, p-value<0.05.

[0015] FIG. 4A-4J show determination of whether the identified LS-3 epitope can enhance induced humoral responses to a model CA09 influenza HA immunogen (HA-RBD) through engineered genetic fusion of the identified epitopes with CA09 HA-RBD. C57BL/6 mice received either 25 μg DNA vaccination with EP twice four weeks apart and were euthanized one weeks post the second vaccination or 10 μg RIBI-adjuvanted protein vaccinations three times four weeks apart and were euthanized one week post the third vaccination. FIG. 4A: Layouts of the engineered LS3-CA09, LS3KO-CA09, and PADRE-CA09 fusion constructs. FIG. 4B and FIG. 4C: Flow plots (FIG. 4B) and groups statistics (FIG. 4C) to compare CD4+ T-cell cytokine responses induced by either DNA-encoded LS3-CA09 or LS3KO-CA09 immunizations in mice to LS3 and LS3KO peptides respectively. FIG. 4D and FIG. 4E: Flow plots (FIG. 4D) and groups statistics (FIG. 4E) to compare CD4+ T-cell cytokine responses induced by either DNA-encoded LS3-CA09 or PADRE-CA09 immunizations in mice to LS3 and PADRE peptides respectively. FIG. 4F: Comparison of poly-functional IFNγ+TNFα+IL-2+CD4+ T-cell responses to either LS3 or PADRE peptides in mice immunized as described in FIG. 4D and FIG. 4E. FIG. 4G and FIG. 4H: Comparison of anti-HA binding antibody responses (FIG. 4G) and HAI titers (FIG. 4H) in mice immunized with DNA-encoded LS3KO-CA09, LS3-CA09 or PADRE-CA09. FIG. 4I and FIG. 4J: Comparison of anti-HA binding antibody responses (FIG. 4I) and HAI titers (FIG. 4J) in mice immunized with RIBI-adjuvanted protein LS3KO-CA09, LS3-CA09 or PADRE-CA09. Each group includes five mice; each dot represents a mouse; error bar represents standard deviation; two-tailed Mann-Whitney Rank Test used to compare groups; p-values were adjusted for multiple comparison where appropriate; *, p-value<0.05.

[0016] FIG. 5A-5D show evaluation of T-cell responses to either the LS or GT8 domains induced by DLnano_LS_GT8 vaccination in BALB/c or C57BL/6 mice. Mice received 25 μg DNA vaccination with EP twice three weeks apart and were euthanized two weeks post the second vaccination for cellular analysis. FIG. 5A and FIG. 5B: Matrix mapping by IFNγ ELISpot assays in the GT8 domain to determine the dominant T-cell epitopes in BALB/c (FIG. 5A) or C57BL/6 (FIG. 5B) mice. FIG. 5C and FIG. 5D: Identification of the dominant CD8+ T-cell epitope by ICS in the GT8 domain for BALB/c mice (FIG. 5C) and in the LS domain for C57BL/6 mice (FIG. 5D). Each group includes five mice; error bar represents standard deviation; arrow above the bar graph represents the dominant peptide pool identified.

[0017] FIG. 6A-6B show analysis of the contributions of the identified LS-3 CD4-helper epitope to the antibody responses induced by DLnano_LS_GT8 in C57BL/6 mice. Mice were immunized in the same manner as described in FIG. 3. FIG. 6A: SEC-MAL trace of SEC-purified CD4MutLS_GT8; the molecular weight was determined to be around 2 MDa for CD4MutLS_GT8. FIG. 6B Humoral responses induced to GT8 by two doses of DLnano_CD4MutLS_GT8 in comparison to DLnano_LS_GT8 and DLmono_GT8, as assessed by ELISA; p-values compare differences between DLnano_CD4MutLS_GT8 and DLnano_LS_GT8 at each timepoint. Each group includes five mice; error bar represents standard deviation; two-tailed Mann-Whitney Rank Test used to compare groups; *, p-value<0.05.

[0018] FIG. 7A-7G show determination of whether the identified LS-3 epitope can enhance induced humoral responses to a model CA09 influenza HA immunogen. C57BL/6 mice received either DNA or protein vaccinations and were euthanized as described in FIG. 4. FIG. 7A and FIG. 7B: IFNγ+ ELIspot assays comparing T-cell responses induced by either DNA-encoded LS3-CA09 or LS3KO-CA09 immunizations in mice to LS3 and LS3KO peptides respectively. FIG. 7C and FIG. 7D: IFNγ+ ELIspot assays comparing T-cell responses induced by either DNA-encoded LS3-CA09 or PADRE-CA09 immunizations in mice to LS3 and PADRE peptides respectively. FIG. 7E: ICS analysis of CD4+ IFNγ+ responses induced by protein LS3KO-CA09, LS3-CA09, or PADRE-CA09 vaccinations in mice to LS3KO, LS3, and PADRE peptides respectively. FIG. 7F and FIG. 7G: IFNγ+ ELIspot assays comparing T-cell responses induced by protein LS3KO-CA09, LS3-CA09, or PADRE-CA09 vaccinations in mice to LS3KO, LS3, and PADRE peptides respectively. Each group includes five mice; each dot represents a mouse; error bar represents standard deviation; two-tailed Mann-Whitney Rank Test used to compare groups; p-values were adjusted for multiple comparison where appropriate; *, p-value<0.05.

### DETAILED DESCRIPTION

[0019] The disclosed method and compositions may be understood more readily by reference to the following detailed description of particular embodiments and the examples included therein and to the figures and their previous and following description. It is to be understood that the disclosed method and compositions are not limited to specific synthetic methods, specific analytical techniques, or to particular reagents unless otherwise specified, and, as such, may vary. It is also to be understood that the terminology used herein is for the purpose of describing particular embodiments only and is not intended to be limiting.

[0020] It is understood that the disclosed method and compositions are not limited to the particular methodology, protocols, and reagents described as these may vary. It is also to be understood that the terminology used herein is for the purpose of describing particular embodiments only, and is not intended to limit the scope of the present disclosure which will be limited only by the appended claims.

[0021] It must be noted that as used herein and in the appended claims, the singular forms “a”, “an,” and “the” include plural reference unless the context clearly dictates otherwise. Thus, for example, reference to “a nucleic acid sequence” includes a plurality of nucleotides that are formed, reference to “the nucleic acid sequence” is a reference to one or more nucleic acid sequences and equivalents thereof known to those skilled in the art, and so forth.

[0022] Ranges may be expressed herein as from “about” one particular value, and/or to “about” another particular value. When such a range is expressed, also specifically contemplated and considered disclosed is the range from the one particular value and/or to the other particular value unless the context specifically indicates otherwise. Similarly, when values are expressed as approximations, by use of the antecedent “about,” it will be understood that the particular value forms another, specifically contemplated embodiment that should be considered disclosed unless the context specifically indicates otherwise. It will be further understood that the endpoints of each of the ranges are significant both in relation to the other endpoint, and independently of the other endpoint unless the context specifically indicates otherwise. The term “about” as used herein when referring to a measurable value such as an amount, a temporal duration, and the like, is meant to encompass variations of ±20%, ±10%, ±5%, ±1%, ±0.5%, or ±0.1% from the specified value, as such variations are appropriate to perform the disclosed methods.

[0023] As used herein, the terms “activate,” “stimulate,” “enhance” “increase” and/or “induce” (and like terms) are used interchangeably to generally refer to the act of improving or increasing, either directly or indirectly, a concentration, level, function, activity, or behavior relative to the natural, expected, or average, or relative to a control condition. “Activate” in context of an immunotherapy refers to a primary response induced by ligation of a cell surface moiety. For example, in the context of receptors, such stimulation entails the ligation of a receptor and a subsequent signal transduction event. Further, the stimulation event may activate a cell and upregulate or downregulate expression or secretion of a molecule. Thus, indirect or direct ligation of cell surface moieties, even in the absence of a direct signal transduction event, may result in the reorganization of cytoskeletal structures, or in the coalescing of cell surface moieties, each of which could serve to enhance, modify, or alter subsequent cellular responses. As used herein, the terms “activating CD4+ T cells” or “CD4+ T cell activation” refer to a process (e.g., a signaling event) causing or resulting in one or more cellular responses of a CD4+ T cell (CTL), selected from: proliferation, differentiation, cytokine secretion, cytotoxic effector molecule release, cytotoxic activity, and expression of activation markers. As used herein, an “activated CD4+ T cell” refers to a CD4+ T cell that has received an activating signal, and thus demonstrates one or more cellular responses, selected from proliferation, differentiation, cytokine secretion, cytotoxic effector molecule release, cytotoxic activity, and expression of activation markers. Suitable assays to measure CD4+ T cell activation are known in the art and are described herein.

[0024] The term “combination therapy” as used herein is meant to refer to administration of one or more therapeutic agents in a sequential manner, that is, wherein each therapeutic agent is administered at a different time, as well as administration of these therapeutic agents, or at least two of the therapeutic agents, in a substantially simultaneous manner. Substantially simultaneous administration can be accomplished, for example, by administering to the subject a single dose having a fixed ratio of each therapeutic agent or in multiple, individual doses for each of the therapeutic agents. For example, one combination of the present disclosure may comprise a pooled sample of one or more nucleic acid molecules comprising one or a plurality of expressible nucleic acid sequences and an adjuvant and/or an anti-viral agent administered at the same or different times. In some embodiments, the pharmaceutical composition of the disclosure can be formulated as a single, co-formulated pharmaceutical composition comprising one or more nucleic acid molecules comprising one or a plurality of expressible nucleic acid sequences and one or more adjuvants and/or one or more anti-viral agents. As another example, a combination of the present disclosure (e.g., DNA or RNA vaccines and anti-viral agent) may be formulated as separate pharmaceutical compositions that can be administered at the same or different time. As used herein, the term “simultaneously” is meant to refer to administration of one or more agents at the same time. For example, in certain embodiments, antiviral vaccine or immunogenic composition and antiviral agents are administered simultaneously). Simultaneously includes administration contemporaneously or immediately sequentially, that is during the same period of time. In certain embodiments, the one or more agents are administered simultaneously in the same hour, or simultaneously in the same day. Sequential or substantially simultaneous administration of each therapeutic agent can be effected by any appropriate route including, but not limited to, oral routes, intravenous routes, sub-cutaneous routes, intramuscular routes, direct absorption through mucous membrane tissues (e.g., nasal, mouth, vaginal, and rectal), and ocular routes (e.g., intravitreal, intraocular, etc.). The therapeutic agents can be administered by the same route or by different routes. For example, one component of a particular combination may be administered by intravenous injection while the other component(s) of the combination may be administered intramuscularly only. The components may be administered in any therapeutically effective sequence. A “combination” embraces groups of compounds or non-small chemical compound therapies useful as part of a combination therapy. In some embodiments, the therapeutic agent is an anti-retroviral therapy, (such as one or a combination of efavirenz, lamivudine and tenofovir disoproxil fumarate) or anti-flu therapy (such as TamiFlu®). In some embodiments, the therapeutic agent is one or a combiantion of: abacavir/dolutegravir/lamivudine (Triumeq), dolutegravir/rilpivirine (Juluca), elvitegravir/cobicistat/emtricitabine/tenofovir disoproxil fumarate (Stribild), elvitegravir/cobicistat/emtricitabine/tenofovir alafenamide (Genvoya), efavirenz/emtricitabine/tenofovir disoproxil fumarate (Atripla), emtricitabine/rilpivirine/tenofovir disoproxil fumarate (Complera), emtricitabine/rilpivirine/tenofovir alafenamide (Odefsey), bictegravir, emtricitabine, and tenofovir alafenamide (Biktarvy). In some embodiments, the therapeutic agent is one or a combination of a reverse transcrioptase inhibitor of a retrovirus such as efavirenz (Sustiva), etravirine (Intelence), nevirapine (Viramune), nevirapine extended-release (Viramune XR), rilpivirine (Edurant), delavirdine mesylate (Rescriptor). In some embodiments, the therapeutic agent is one or a combination of a protease inhibitor of a retrovirus, such as: atazanavir/cobicistat (Evotaz), darunavir/cobicistat (Prezcobix), lopinavir/ritonavir (Kaletra), ritonavir (Norvir), atazanavir (Reyataz), darunavir (Prezista), fosamprenavir (Lexiva), tipranavir (Aptivus).

[0025] As used herein, “expression” refers to the process by which a polynucleotide is transcribed from a DNA template (such as into and mRNA or other RNA transcript) and/or the process by which a transcribed mRNA (or administered mRNA) is translated into peptides, polypeptides, or proteins. Transcripts and encoded polypeptides may be collectively referred to as “gene product.” If the polynucleotide is derived from genomic DNA, expression may include splicing of the mRNA in a eukaryotic cell. In some embodiments, the at least one expressible nucleic acid sequence comprises only DNA nucleotides, RNA nucleotides or comprises both RNA and DNA nucleotides. In some embodiments, the at least one expressible nucleic acid consist of RNA. In some embodiments, the at least one expressible nucleic acid consist of DNA.

[0026] The terms “functional fragment” means any portion of a polypeptide or nucleic acid sequence from which the respective full-length polypeptide or nucleic acid relates that is of a sufficient length and has a sufficient structure to confer a biological affect that is at least similar or substantially similar to the full-length polypeptide or nucleic acid upon which the fragment is based. In some embodiments, a functional fragment is a portion of a full-length or wild-type nucleic acid sequence that encodes any one of the nucleic acid sequences disclosed herein, and said portion encodes a polypeptide of a certain length and/or structure that is less than full-length but encodes a domain that still biologically functional as compared to the full-length or wild-type protein. In some embodiments, the functional fragment may have a reduced biological activity, about equivalent biological activity, or an enhanced biological activity as compared to the wild-type or full-length polypeptide sequence upon which the fragment is based (such wild-type or full length sequences “reference sequences” or each individually a “reference sequence”). In some embodiments, the functional fragment is derived from the sequence of an organism, such as a human. In such embodiments, the functional fragment may retain about 99%, 98%, 97%, 96%, 95%, 94%, 93%, 92%, 91%, or 90% sequence identity to the wild-type human sequence upon which the sequence is derived. In some embodiments, the functional fragment may retain about 85%, 80%, 75%, 70%, 65%, or 60% sequence identity to the wild-type sequence upon which the sequence is derived.

[0027] By “fragment” is meant a portion of a polypeptide or nucleic acid molecule. This portion contains, preferably, at least about 5%, 10%, 20%, 30%, 40%, 50%, 60%, 70%, 80%, or about 90% of the entire length of the reference nucleic acid molecule or polypeptide. A fragment may contain about 5, 10, 20, 30, 40, 50, 60, 70, 80, 90, 100, 200, 300, 400, 500, 600, 700, 800, 900, 1000 or more nucleotides or amino acids.

[0028] “Optional” or “optionally” means that the subsequently described event, circumstance, or material may or may not occur or be present, and that the description includes instances where the event, circumstance, or material occurs or is present and instances where it does not occur or is not present.

[0029] The phrase “and/or,” as used herein in the specification and in the claims, should be understood to mean “either or both” of the elements so conjoined, i.e., elements that are conjunctively present in some cases and disjunctively present in other cases. Other elements may optionally be present other than the elements specifically identified by the “and/or” clause, whether related or unrelated to those elements specifically identified unless clearly indicated to the contrary. Thus, as a non-limiting example, a reference to “A and/or B,” when used in conjunction with open-ended language such as “comprising” can refer, in some embodiments, to A without B (optionally including elements other than B); in another embodiments, to B without A (optionally including elements other than A); in yet another embodiments, to both A and B (optionally including other elements); etc.

[0030] As used herein in the specification and in the claims, “or” should he understood to have the same meaning as “and/or” as defined above. For example, when separating items in a list, “or” or “and/or” shall be interpreted as being inclusive, i.e., the inclusion of at least one, but also including more than one, of a number or list of elements, and, optionally, additional unlisted items. Only terms clearly indicated to the contrary, such as “only one of” or “exactly one of,” or, when used in the claims, “consisting of,” will refer to the inclusion of exactly one element of a number or list of elements. In general, the term “or” as used herein shall only be interpreted as indicating exclusive alternatives (i.e. “one or the other but not both”) when preceded by terms of exclusivity, “either,” “one of,” “only one of,” or “exactly one of” “Consisting essentially of,” when used in the claims, shall have its ordinary meaning as used in the field of patent law.

[0031] As used herein an “antigen” is meant to refer to any substance that elicits an immune response.

[0032] As used herein, the term “electroporation,” “electro-permeabilization,” or “electro-kinetic enhancement” (“EP”), are used interchangeably and are meant to refer to the use of a transmembrane electric field pulse to induce microscopic pathways (pores) in a bio-membrane; their presence allows biomolecules such as plasmids, oligonucleotides, siRNA, drugs, ions, and/or water to pass from one side of the cellular membrane to the other. In some of the disclosed methods of treatment or prevention, the method comprises a step of electroporation of a subject's tissue for a sufficient time and with a sufficient electrical field capable of inducing uptake of the pharmaceutical compositions disclosed herein into the antigen-presenting cells. In some embodiments, the cells are antigen presenting cells.

[0033] The term “pharmaceutically acceptable excipient,” “pharmaceutically acceptable carrier” or “pharmaceutically acceptable diluent” as used herein is meant to refer to an excipient, carrier or diluent that can be administered to a subject, together with an agent or the pharmaceutical compositions disclosed herein, and which is inert or fails to eliminate the pharmacological activity of the active agent of the pharmaceutical composition. In some embodiments, the pharmaceutically acceptable carrier does fails to destroy or is incapable of eliminating the pharmacological activity of an active agent/vaccine and is nontoxic when administered in doses sufficient to deliver a therapeutic amount of the active agent. The term “pharmaceutically acceptable salt” of nucleic acids as used herein may be an acid or base salt that is generally considered in the art to be suitable for use in contact with the tissues of human beings or animals without excessive toxicity, irritation, allergic response, or other problem or complication. Such salts include mineral and organic acid salts of basic residues such as amines, as well as alkali or organic salts of acidic residues such as carboxylic acids. Specific pharmaceutical salts include, but are not limited to, salts of acids such as hydrochloric, phosphoric, hydrobromic, malic, glycolic, fumaric, sulfuric, sulfamic, suifanilic, formic, toluenesulfonie, methanesulfonic, benzene sulfonic, ethane disulfonic, 2-hydroxyethyl sulfonic, nitric, benzoic, 2-acetoxybenzoic, citric, tartaric, lactic, stearic, salicylic, glutamic, ascorbic, pamoic, succinic, fumaric, maleic, propionic, hydroxymaleic, hydroiodic, phenyiacetic, alkanoic such as acetic, HOOC—(CH₂)n-COOH where n is 0-4, and the like. Similarly, pharmaceutically acceptable cations include, but are not limited to sodium, potassium, calcium, aluminum, lithium and ammonium. Those of ordinary skill in the art will recognize from this disclosure and the knowledge in the art that further pharmaceutically acceptable salts for the pooled viral specific antigens or polynucleotides provided herein, including those listed by Remington's Pharmaceutical Sciences, 17th ed., Mack Publishing Company, Easton, Pa., p. 1418 (1985). In general, a pharmaceutically acceptable acid or base salt can be synthesized from a parent compound that contains a basic or acidic moiety by any conventional chemical method. Briefly, such salts can be prepared by reacting the free acid or base forms of these compounds with a stoichiometric amount of the appropriate base or acid in an appropriate solvent.

[0034] As used herein, the terms “prevent,” “preventing,” “prevention,” “prophylactic treatment,” and the like, are meant to refer to reducing the probability of developing a disease or condition in a subject, who does not have, but is at risk of or susceptible to developing a disease or condition.

[0035] As used herein, the term “purified” means that the polynucleotide or polypeptide or fragment, variant, or derivative thereof is substantially free of other biological material with which it is naturally associated, or free from other biological materials derived, e.g., from a recombinant host cell that has been genetically engineered to express the polypeptide of the present disclosure. That is, e.g., a purified polypeptide of the present disclosure is a polypeptide that is at least from about 70 to 100% pure, i.e., the polypeptide is present in a composition wherein the polypeptide constitutes from about 70 to about 100% by weight of the total composition. In some embodiments, the purified polypeptide of the present disclosure is from about 75% to about 99% by weight pure, from about 80% to about 99% by weight pure, from about 90 to about 99% by weight pure, or from about 95% to about 99% by weight pure.

[0036] The terms “subject,” “individual,” and “patient” are used interchangeably herein to refer to a vertebrate, preferably a mammal, more preferably a human. Mammals include, but are not limited to, murine, simians, humans, farm animals, cows, pigs, goats, sheep, horses, dogs, sport animals, and pets. Tissues, cells and their progeny obtained in vivo or cultured in vitro are also encompassed by the definition of the term “subject.” The term “subject” is also used throughout the specification in some embodiments to describe an animal from which a cell sample is taken or an animal to which a disclosed cell or nucleic acid sequences have been administered. In some embodiment, the subject is a human. For treatment of those conditions which are specific for a specific subject, such as a human being, the term “patient” may be interchangeably used. In some instances in the description of the present disclosure, the term “patient” will refer to human patients suffering from a particular disease or disorder. In some embodiments, the subject may be a non-human animal. The term “mammal” encompasses both humans and non-humans and includes but is not limited to humans, non-human primates, canines, felines, murine, bovines, equines, caprine, and porcines.

[0037] The term “therapeutic effect” as used herein is meant to refer to some extent of relief of one or more of the symptoms of a disorder (e.g., SARS-CoV-2 infection) or its associated pathology. A “therapeutically effective amount” as used herein is meant to refer to an amount of an agent which is effective, upon single or multiple dose administration (such as a first, second and/or third booster) to the cell or subject, in prolonging the survivability of the patient with such a disorder, reducing one or more signs or symptoms of the disorder, preventing or delaying, and the like beyond that expected in the absence of such treatment. A “therapeutically effective amount” is intended to qualify the amount required to achieve a therapeutic effect. A physician or veterinarian having ordinary skill in the art can readily determine and prescribe the “therapeutically effective amount” (e.g., ED50) of the pharmaceutical composition required. For example, the physician or veterinarian could start doses of the compounds of the present disclosure employed in a pharmaceutical composition at levels lower than that required in order to achieve the desired therapeutic effect and gradually increase the dosage until the desired effect is achieved.

[0038] The terms “treat,” “treated,” “treating,” “treatment,” and the like as used herein are meant to refer to reducing or ameliorating a disorder and/or symptoms associated therewith (e.g., a viral infection). “Treating” can refer to administration of the DNA and/or RNA vaccines described herein to a subject after the onset, or suspected onset, of a viral infection. “Treating” includes the concepts of “alleviating,” which refers to lessening the frequency of occurrence or recurrence, or the severity, of any symptoms or other ill effects related to a virus and/or the side effects associated with viral therapy. The term “treating” also encompasses the concept of “managing” which refers to reducing the severity of a particular disease or disorder in a patient or delaying its recurrence, e.g., lengthening the period of remission in a patient who had suffered from the disease. It is appreciated that, although not precluded, treating a disorder or condition does not require that the disorder, condition, or symptoms associated therewith be completely eliminated.

[0039] For any therapeutic agent described herein the therapeutically effective amount may be initially determined from preliminary in vitro studies and/or animal models. A therapeutically effective dose may also be determined from human data. The applied dose can be adjusted based on the relative bioavailability and potency of the administered agent. Adjusting the dose to achieve maximal efficacy based on the methods described above and other well-known methods is within the capabilities of the ordinarily skilled artisan. General principles for determining therapeutic effectiveness, which may be found in Chapter 1 of Goodman and Gilman's The Pharmacological Basis of Therapeutics, 10th Edition, McGraw-Hill (New York) (2001), incorporated herein by reference, are summarized below. Pharmacokinetic principles provide a basis for modifying a dosage regimen to obtain a desired degree of therapeutic efficacy with a minimum of unacceptable adverse effects. In situations where the drug's plasma concentration can be measured and related to the therapeutic window, additional guidance for dosage modification can be obtained. Drug products are considered to be pharmaceutical equivalents if they contain the same active ingredients and are identical in strength or concentration, dosage form, and route of administration. Two pharmaceutically equivalent drug products are considered to be bioequivalent when the rates and extents of bioavailability of the active ingredient in the two products are not significantly different under suitable test conditions.

[0040] The terms “polynucleotide,” “oligonucleotide” and “nucleic acid” are used interchangeably throughout and include DNA molecules (e.g., cDNA or genomic DNA), RNA molecules (e.g., mRNA), analogs of the DNA or RNA generated using nucleotide analogs (e.g., peptide nucleic acids and non-naturally occurring nucleotide analogs), and hybrids thereof. The nucleic acid molecule can be single-stranded or double-stranded. In some embodiments, the nucleic acid molecules of the disclosure comprise a contiguous open reading frame encoding an antibody, or a fragment thereof, as described herein. “Nucleic acid” or “oligonucleotide” or “polynucleotide” as used herein may mean at least two nucleotides covalently linked together. The depiction of a single strand also defines the sequence of the complementary strand. Thus, a nucleic acid also encompasses the complementary strand of a depicted single strand. Many variants of a nucleic acid may be used for the same purpose as a given nucleic acid. Thus, a nucleic acid also encompasses substantially identical nucleic acids and complements thereof. A single strand provides a probe that may hybridize to a target sequence under stringent hybridization conditions. Thus, a nucleic acid also encompasses a probe that hybridizes under stringent hybridization conditions. Nucleic acids may be single stranded or double stranded, or may contain portions of both double stranded and single stranded sequence. The nucleic acid may be DNA, both genomic and cDNA, RNA, or a hybrid, where the nucleic acid may contain combinations of deoxyribo- and ribo-nucleotides, and combinations of bases including uracil, adenine, thymine, cytosine, guanine, inosine, xanthine hypoxanthine, isocytosine and isoguanine. Nucleic acids may be obtained by chemical synthesis methods or by recombinant methods. A nucleic acid will generally contain phosphodiester bonds, although nucleic acid analogs maybe included that may have at least one different linkage, e.g., phosphoramidate, phosphorothioate, phosphorodithioate, or O-methylphosphoroamidite linkages and peptide nucleic acid backbones and linkages. Other analog nucleic acids include those with positive backbones; non-ionic backbones, and non-ribose backbones, including those described in U.S. Pat. Nos. 5,235,033 and 5,034,506, which are incorporated by reference in their entireties.

[0041] Nucleic acids containing one or more non-naturally occurring or modified nucleotides are also included within one definition of nucleic acids. The modified nucleotide analog may he located for example at the 5′-end and/or the 3′-end of the nucleic acid molecule. Representative examples of nucleotide analogs may be selected from sugar- or backbone-modified ribonucleotides. It should be noted, however, that also nucleobase-modified ribonucleotides, i.e. ribonucleotides, containing a non-naturally occurring nucleobase instead of a naturally occurring nucleobase such as uridines or cytidines modified at the 5-position, e.g. 5-(2-amino)propyl uridine, 5-bromo uridine; adenosines and guanosines modified at the 8-position, e.g. 8-bromo guanosine; deaza nucleotides, e.g. 7-deaza-adenosine; 0- and N-alkylated nucleotides, e.g. N6-methyl adenosine are suitable. The 2′-OH-group may be replaced by a group selected from H, OR, R, halo, SH, SR, NH₂, NHR, N₂ or CN, wherein R is C₁-C₆ alkyl, alkenyl or alkynyl and halo is F, Cl, Br or I. Modified nucleotides also include nucleotides conjugated with cholesterol through, e.g., a hydroxyprolinol linkage as described in Krutzfeldt et al., Nature (Oct. 30, 2005), Soutschek et al., Nature 432:173-178 (2004), and U.S. Patent Publication No. 20050107325, which are incorporated herein by reference in their entireties. Modified nucleotides and nucleic acids may also include locked nucleic acids (LNA), as described in U.S. Patent No. 20020115080, which is incorporated herein by reference. Additional modified nucleotides and nucleic acids are described in U.S. Patent Publication No. 20050182005, which is incorporated herein by reference in its entirety. Modifications of the ribose-phosphate backbone may be done for a variety of reasons, e.g., to increase the stability and half-life of such molecules in physiological environments, to enhance diffusion across cell membranes, or as probes on a biochip. Mixtures of naturally occurring nucleic acids and analogs may be made; alternatively, mixtures of different nucleic acid analogs, and mixtures of naturally occurring nucleic acids and analogs may be made. In some embodiments, the expressible nucleic acid sequence is in the form of DNA. In some embodiments, the expressible nucleic acid is in the form of RNA with a sequence that encodes the polypeptide sequences disclosed herein and, in some embodiments, the expressible nucleic acid sequence is an RNA/DNA hybrid molecule that encodes any one or plurality of polypeptide sequences disclosed herein.

[0042] As used herein, the term “nucleic acid molecule” is a molecule that comprises one or more nucleotide sequences that encode one or more proteins. In some embodiments, a nucleic acid molecule comprises initiation and termination signals operably linked to regulatory elements including a promoter and polyadenylation signal capable of directing expression in the cells of the individual to whom the nucleic acid molecule is administered. In some embodiments, the nucleic acid molecule also includes a plasmid containing one or more nucleotide sequences that encode one or a plurality of viral antigens. In some embodiments, the disclosure relates to a pharmaceutical composition comprising a first, second, third or more nucleic acid molecule, each of which encoding one or a plurality of viral antigens and at least one of each plasmid comprising one or more of the compositions disclosed herein.

[0043] The terms “polypeptide,” “peptide” and “protein” are used interchangeably herein to refer to polymers of amino acids of any length. The polymer may be linear or branched, it may comprise modified amino acids, and it may be interrupted by non-natural amino acids or chemical groups that are not amino acids. The terms also encompass an amino acid polymer that has been modified; for example, disulfide bond formation, glycosylation, lipidation, acetylation, phosphorylation, or any other manipulation, such as conjugation with a labeling component. As used herein the term “amino acid” includes natural and/or unnatural or synthetic amino acids, including glycine and both the D or L optical isomers, and amino acid analogs and peptidomimetics.

[0044] The “percent identity” or “percent homology” of two polynucleotide or two polypeptide sequences is determined by comparing the sequences using the GAP computer program (a part of the GCG Wisconsin Package, version 10.3 (Accelrys, San Diego, Calif.)) using its default parameters. “Identical” or “identity” as used herein in the context of two or more nucleic acids or amino acid sequences, may mean that the sequences have a specified percentage of residues that are the same over a specified region. The percentage may be calculated by optimally aligning the two sequences, comparing the two sequences over the specified region, determining the number of positions at which the identical residue occurs in both sequences to yield the number of matched positions, dividing the number of matched positions by the total number of positions in the specified region, and multiplying the result by 100 to yield the percentage of sequence identity. In cases where the two sequences are of different lengths or the alignment produces one or more staggered ends and the specified region of comparison includes only a single sequence, the residues of single sequence are included in the denominator but not the numerator of the calculation. When comparing DNA and RNA, thymine (T) and uracil (U) may be considered equivalent. Identity may he performed manually or by using a computer sequence algorithm such as BLAST or BLAST 2.0. Briefly, the BLAST algorithm, which stands for Basic Local Alignment Search Tool is suitable for determining sequence similarity. Software for performing BLAST analyses is publicly available through the National Center for Biotechnology Information (ncbi.nlm.nih.gov). This algorithm involves first identifying high scoring sequence pair (HSPs) by identifying short words of length Win the query sequence that either match or satisfy some positive-valued threshold score T when aligned with a word of the same length in a database sequence. T is referred to as the neighborhood word score threshold (Altschul et al., supra). These initial neighborhood word hits act as seeds for initiating searches to find HSPs containing them. The word hits are extended in both directions along each sequence for as far as the cumulative alignment score can be increased. Extension for the word hits in each direction are halted when: 1) the cumulative alignment score falls off by the quantity X from its maximum achieved value; 2) the cumulative score goes to zero or below, due to the accumulation of one or more negative-scoring residue alignments; or 3) the end of either sequence is reached. The Blast algorithm parameters W, T and X determine the sensitivity and speed of the alignment. The Blast program uses as defaults a word length (W) of 11, the BLOSUM62 scoring matrix (see Henikoff et al., Proc. Natl. Acad. Sci. USA, 1992, 89, 10915-10919, which is incorporated herein by reference in its entirety) alignments (B) of 50, expectation (E) of 10, M=5, N=4, and a comparison of both strands. The BLAST algorithm (Karlin et al., Proc. Natl. Acad. Sci. USA, 1993, 90, 5873-5787, which is incorporated herein by reference in its entirety) and Gapped BLAST perform a statistical analysis of the similarity between two sequences. One measure of similarity provided by the BLAST algorithm is the smallest sum probability (P(N)), which provides an indication of the probability by which a match between two nucleotide sequences would occur by chance. For example, a nucleic acid is considered similar to another if the smallest sum probability in comparison of the test nucleic acid to the other nucleic acid is less than about 1, less than about 0.1, less than about 0.01, and less than about 0.001. Two single-stranded polynucleotides are “the complement” of each other if their sequences can be aligned in an anti-parallel orientation such that every nucleotide in one polynucleotide is opposite its complementary nucleotide in the other polynucleotide, without the introduction of gaps, and without unpaired nucleotides at the 5′ or the 3′ end of either sequence. A polynucleotide is “complementary” to another polynucleotide if the two polynucleotides can hybridize to one another under moderately stringent conditions. Thus, a polynucleotide can be complementary to another polynucleotide without being its complement.

[0045] The term “hybridization” or “hybridizes” as used herein refers to the formation of a duplex between nucleotide sequences that are sufficiently complementary to form duplexes via Watson-Crick base pairing. Two nucleotide sequences are “complementary” to one another when those molecules share base pair organization homology. “Complementary” nucleotide sequences will combine with specificity to form a stable duplex under appropriate hybridization conditions. For instance, two sequences are complementary when a section of a first sequence can bind to a section of a second sequence in an anti-parallel sense wherein the 3′-end of each sequence binds to the 5′-end of the other sequence and each A, T(U), G and C of one sequence is then aligned with a T(U), A, C and G, respectively, of the other sequence. RNA sequences can also include complementary G=U or U=G base pairs. Thus, two sequences need not have perfect homology to be “complementary.” Usually two sequences are sufficiently complementary when at least about 90% (preferably at least about 95%) of the nucleotides share base pair organization over a defined length of the molecule.

[0046] By “substantially identical” is meant nucleic acid molecule (or polypeptide) exhibiting at least about 50% identity to a reference amino acid sequence (for example, any one of the amino acid sequences described herein) or nucleic acid sequence (for example, any one of the nucleic acid sequences described herein). In some embodiments, such a sequence is at least about 60%, 70%, 80% or 85%, 90%, 95% or even 99% identical at the amino acid level or nucleic acid to the sequence used for comparison.

[0047] A nucleotide sequence is “operably linked” to a regulatory sequence if the regulatory sequence affects the expression (e.g., the level, timing, or location of expression) of the nucleotide sequence. A “regulatory sequence” is a nucleic acid that affects the expression (e.g., the level, timing, or location of expression) of a nucleic acid to which it is operably linked. The regulatory sequence can, for example, exert its effects directly on the regulated nucleic acid, or through the action of one or more other molecules (e.g., polypeptides that bind to the regulatory sequence and/or the nucleic acid). Examples of regulatory sequences include promoters, enhancers and other expression control elements (e.g., polyadenylation signals). Further examples of regulatory sequences are described in, for example, Goeddel, 1990, Gene Expression Technology: Methods in Enzymology 185, Academic Press, San Diego, Calif. and Baron et al., 1995, Nucleic Acids Res. 23:3605-06.

[0048] A “vector” is a nucleic acid that can be used to introduce another nucleic acid linked to it into a cell. One type of vector is a “plasmid,” which refers to a linear or circular double stranded DNA molecule into which additional nucleic acid segments can be ligated. Another type of vector is a viral vector (e.g., replication defective retroviruses, adenoviruses and adeno-associated viruses), comprising additional, exogenous DNA, RNA or hybrid DNA or RNA molecules that can be introduced into the viral genome. Certain vectors are capable of autonomous replication in a host cell into which they are introduced (e.g., bacterial vectors comprising a bacterial origin of replication and episomal mammalian vectors). Other vectors (e.g., non-episomal mammalian vectors) are integrated into the genome of a host cell upon introduction into the host cell, and thereby are replicated along with the host genome. An “expression vector” is a type of vector that can direct the expression of a chosen polynucleotide. The disclosure relates to any one or plurality of vectors that comprise nucleic acid sequences encoding any one or plurality of amino acid sequence disclosed herein.

[0049] The term “vaccine” as used herein is meant to refer to a composition for generating immunity for the prophylaxis and/or treatment of diseases (e.g., viral infections). Accordingly, vaccines are medicaments which comprise antigens in protein and/or nucleic acid forms and are in animals for generating specific defense and protective substance by vaccination. A “vaccine composition” or a “DNA vaccine composition” can include a pharmaceutically acceptable excipient, carrier or diluent. A “DNA vaccine composition” as used herein can comprise a DNA vaccine, a RNA vaccine or a combination thereof.

[0050] “Variants” are intended to mean substantially similar sequences. For nucleic acid molecules, a variant comprises a nucleic acid molecule having deletions (i.e., truncations) at the 5′ and/or 3′ end; deletion and/or addition of one or more nucleotides at one or more internal sites in the native polynucleotide; and/or substitution of one or more nucleotides at one or more sites in the native polynucleotide. As used herein, a “native” nucleic acid molecule or polypeptide comprises a naturally occurring or endogenous nucleotide sequence or amino acid sequence, respectively. For nucleic acid molecules, conservative variants include those sequences that, because of the degeneracy of the genetic code, encode the amino acid sequence of one of the polypeptides of the disclosure. Variant nucleic acid molecules also include synthetically derived nucleic acid molecules, such as those generated, for example, by using site-directed mutagenesis but which still encode a protein of the disclosure. Generally, variants of a particular nucleic acid molecule of the disclosure will have at least about 70%, 75%, 80%, 85%, 90%, 91%, 92%, 93%, 94%, 95%, 96%, 97%, 98%, 99% or more sequence identity to that particular polynucleotide as determined by sequence alignment programs and parameters as described elsewhere herein. Variants of a particular nucleic acid molecule of the disclosure (i.e., the reference DNA sequence) can also be evaluated by comparison of the percent sequence identity between the polypeptide encoded by a variant nucleic acid molecule and the polypeptide encoded by the reference nucleic acid molecule. Percent sequence identity between any two polypeptides can be calculated using sequence alignment programs and parameters described elsewhere herein. Where any given pair of nucleic acid molecule of the disclosure is evaluated by comparison of the percent sequence identity shared by the two polypeptides that they encode, the percent sequence identity between the two encoded polypeptides is at least about 70%, 75%, 80%, 85%, 90%, 91%, 92%, 93%, 94%, 95%, 96%, 97%, 98%, 99% or more sequence identity. In some embodiments, the term “variant” protein is intended to mean a protein derived from the native protein by deletion (so-called truncation) of one or more amino acids at the N-terminal and/or C-terminal end of the native protein; deletion and/or addition of one or more amino acids at one or more internal sites in the native protein; or substitution of one or more amino acids at one or more sites in the native protein. Variant proteins encompassed by the present disclosure are biologically active, that is they continue to possess the desired biological activity of the native protein as described herein. Such variants may result from, for example, genetic polymorphism or from human manipulation. Biologically active variants of a protein of the disclosure will have at least about 70%, 75%, 80%, 85%, 90%, 91%, 92%, 93%, 94%, 95%, 96%, 97%, 98%, 99% or more sequence identity to the amino acid sequence for the native protein as determined by sequence alignment programs and parameters described elsewhere herein. A biologically active variant of a protein of the disclosure may differ from that protein by as few as 1-15 amino acid residues, as few as 1-10, such as 6-10, as few as 5, as few as 4, 3, 2, or even 1 amino acid residue. The proteins or polypeptides of the disclosure may be altered in various ways including amino acid substitutions, deletions, truncations, and insertions. Methods for such manipulations are generally known in the art. For example, amino acid sequence variants and fragments of the proteins can be prepared by mutations in the nucleic acid sequence that encode the amino acid sequence recombinantly. In some embodiments, the nucleic acid molecules or the nucleic acid sequences comprise conservative mutations of 1, 2, 3, 4, 5, 6, 7, 8, 9, 10 or more nucleotides.

[0051] Finally, it should be understood that all of the individual values and sub-ranges of values contained within an explicitly disclosed range are also specifically contemplated and should be considered disclosed unless the context specifically indicates otherwise. The foregoing applies regardless of whether in particular cases some or all of these embodiments are explicitly disclosed.

[0052] Unless defined otherwise, all technical and scientific terms used herein have the same meanings as commonly understood by one of skill in the art to which the disclosed method and compositions belong. Although any methods and materials similar or equivalent to those described herein can be used in the practice or testing of the present method and compositions, the particularly useful methods, devices, and materials are as described. Publications cited herein and the material for which they are cited are hereby specifically incorporated by reference. Nothing herein is to be construed as an admission that the present disclosure is not entitled to antedate such disclosure by virtue of prior disclosure. No admission is made that any reference constitutes prior art. The discussion of references states what their authors assert, and applicants reserve the right to challenge the accuracy and pertinency of the cited documents. It will be clearly understood that, although a number of publications are referred to herein, such reference does not constitute an admission that any of these documents forms part of the common general knowledge in the art.

[0053] Throughout the description and claims of this specification, the word “comprise” and variations of the word, such as “comprising” and “comprises,” means “including but not limited to,” and is not intended to exclude, for example, other additives, components, integers or steps. In particular, in methods stated as comprising one or more steps or operations it is specifically contemplated that each step comprises what is listed (unless that step includes a limiting term such as “consisting of”), meaning that each step is not intended to exclude, for example, other additives, components, integers or steps that are not listed in the step.

[0054] In one aspect of the invention, it is desired that the LS-3 constructs provides for improved transcription and translation, including having one or more of the following: low GC content leader sequence to increase transcription; mRNA stability and codon optimization; eliminating to the extent possible cis-acting sequence motifs (i.e., internal TATA-boxes).

[0055] In some aspects of the invention, it is desired to incorporate the LS-3 constructs into a vaccine regimen, either as part of the vaccine composition or as a separate composition delivered in a coordinated fashion with the vaccine in order to generate a broad immune against vaccine immunogens. In some aspects of the invention, it is desired to provide the LS-3 constructs as an immunotherapeutic which can be used to modulate immune responses in an individual. In some aspects of the invention, it is desired to provide the improved LS-3 constructs in order to provide expression vectors which can be used to obtain high levels of LS-3 expression.

a. Antibody

[0056] “Antibody” may mean an antibody of classes IgG, IgM, IgA, IgD or IgE, or fragments, fragments or derivatives thereof, including Fab, F(ab′)2, Fd, and single chain antibodies, diabodies, bispecific antibodies, bifunctional antibodies and derivatives thereof. The antibody may be an antibody isolated from the serum sample of mammal, a polyclonal antibody, affinity purified antibody, or mixtures thereof which exhibits sufficient binding specificity to a desired epitope or a sequence derived therefrom.

b. Coding Sequence

[0057] “Coding sequence” or “encoding nucleic acid” as used herein may mean refers to the nucleic acid (RNA or DNA molecule) that comprise a nucleotide sequence which encodes a protein. The coding sequence may further include initiation and termination signals operably linked to regulatory elements including a promoter and polyadenylation signal capable of directing expression in the cells of an individual or mammal to whom the nucleic acid is administered.

[0058] 1. Hyperproliferative

[0059] As used herein, the term “hyperproliferative diseases” is meant to refer to those diseases and disorders characterized by hyperproliferation of cells, senescence of cells or failure to clear, disruption of the cell cycle or disruption of apoptosis of cells and the term “hyperproliferative-associated protein” is meant to refer to proteins that are associated with a hyperproliferative disease. In some embodiments, hyperproliferative cells are those that are oncogenic, neoplastic, cancerous, tumor-forming or metastasizing.

m. Identical

[0060] “Identical” or “identity” as used herein in the context of two or more nucleic acids or polypeptide sequences, may mean that the sequences have a specified percentage of residues that are the same over a specified region. The percentage may be calculated by optimally aligning the two sequences, comparing the two sequences over the specified region, determining the number of positions at which the identical residue occurs in both sequences to yield the number of matched positions, dividing the number of matched positions by the total number of positions in the specified region, and multiplying the result by 100 to yield the percentage of sequence identity. In cases where the two sequences are of different lengths or the alignment produces one or more staggered ends and the specified region of comparison includes only a single sequence, the residues of single sequence are included in the denominator but not the numerator of the calculation. When comparing DNA and RNA, thymine (T) and uracil (U) may be considered equivalent. Identity may be performed manually or by using a computer sequence algorithm such as BLAST or BLAST 2.0.

n. Impedance

[0061] “Impedance” as used herein may be used when discussing the feedback mechanism and can be converted to a current value according to Ohm's law, thus enabling comparisons with the preset current.

o. Immune Response

[0062] “Immune response” as used herein may mean the activation of a host's immune system, e.g., that of a mammal, in response to the introduction of one or more RSV consensus antigen via the provided DNA plasmid vaccines. The immune response can be in the form of a cellular or humoral response, or both.

p. Intracellular Pathogen

[0063] “Intracellular pathogen” as used herein, is meant to refer to a virus or pathogenic organism that, at least part of its reproductive or life cycle, exists within a host cell and therein produces or causes to be produced, pathogen proteins.

q. Nucleic Acid

[0064] “Nucleic acid” or “oligonucleotide” or “polynucleotide” as used herein may mean at least two nucleotides covalently linked together. The depiction of a single strand also defines the sequence of the complementary strand. Thus, a nucleic acid also encompasses the complementary strand of a depicted single strand. Many variants of a nucleic acid may be used for the same purpose as a given nucleic acid. Thus, a nucleic acid also encompasses substantially identical nucleic acids and complements thereof. A single strand provides a probe that may hybridize to a target sequence under stringent hybridization conditions. Thus, a nucleic acid also encompasses a probe that hybridizes under stringent hybridization conditions.

[0065] Nucleic acids may be single stranded or double stranded, or may contain portions of both double stranded and single stranded sequence. The nucleic acid may be DNA, both genomic and cDNA, RNA, or a hybrid, where the nucleic acid may contain combinations of deoxyribo- and ribo-nucleotides, and combinations of bases including uracil, adenine, thymine, cytosine, guanine, inosine, xanthine hypoxanthine, isocytosine and isoguanine. Nucleic acids may be obtained by chemical synthesis methods or by recombinant methods.

r. Operably Linked

[0066] “Operably linked” as used herein when referring to a gene operably linked to a promoter refers to the linkage of the two components such that expression of the gene is under the control of a promoter with which it is spatially connected. A promoter may be positioned 5′ (upstream) or 3′ (downstream) of a gene under its control. The distance between the promoter and a gene may be approximately the same as the distance between that promoter and the gene it controls in the gene from which the promoter is derived. As is known in the art, variation in this distance may be accommodated without loss of promoter function. When referring to a signal peptide operable linked to a protein, the term refers to the protein having the signal peptide incorporated as part of the protein in a manner that it can function as a signal peptide. When referring to coding sequence that encodes a signal peptide operable linked to coding sequence that encodes a protein, the term refers to the coding sequences arranged such that the translation of the coding sequence produces a protein having the signal peptide incorporated as part of the protein in a manner that it can function as a signal peptide

s. Promoter

[0067] “Promoter” as used herein may mean a synthetic or naturally-derived molecule which is capable of conferring, activating or enhancing expression of a nucleic acid in a cell. A promoter may comprise one or more specific transcriptional regulatory sequences to further enhance expression and/or to alter the spatial expression and/or temporal expression of same. A promoter may also comprise distal enhancer or repressor elements, which can be located as much as several thousand base pairs from the start site of transcription. A promoter may be derived from sources including viral, bacterial, fungal, plants, insects, and animals. A promoter may regulate the expression of a gene component constitutively, or differentially with respect to cell, the tissue or organ in which expression occurs or, with respect to the developmental stage at which expression occurs, or in response to external stimuli such as physiological stresses, pathogens, metal ions, or inducing agents. Representative examples of promoters include the bacteriophage T7 promoter, bacteriophage T3 promoter, SP6 promoter, lac operator-promoter, tac promoter, SV40 late promoter, SV40 early promoter, RSV-LTR promoter, CMV IE promoter, SV40 early promoter or SV40 late promoter and the CMV IE promoter.

t. Stringent Hybridization Conditions

[0068] “Stringent hybridization conditions” as used herein may mean conditions under which a first nucleic acid sequence (e.g., probe) will hybridize to a second nucleic acid sequence (e.g., target), such as in a complex mixture of nucleic acids. Stringent conditions are sequence-dependent and will be different in different circumstances. Stringent conditions may be selected to be about 5-10° C. lower than the thermal melting point (Tₘ) for the specific sequence at a defined ionic strength pH. The Tₘ may be the temperature (under defined ionic strength, pH, and nucleic concentration) at which 50% of the probes complementary to the target hybridize to the target sequence at equilibrium (as the target sequences are present in excess, at Tₘ, 50% of the probes are occupied at equilibrium). Stringent conditions may be those in which the salt concentration is less than about 1.0 M sodium ion, such as about 0.01-1.0 M sodium ion concentration (or other salts) at pH 7.0 to 8.3 and the temperature is at least about 30° C. for short probes (e.g., about 10-50 nucleotides) and at least about 60° C. for long probes (e.g., greater than about 50 nucleotides). Stringent conditions may also be achieved with the addition of destabilizing agents such as formamide. For selective or specific hybridization, a positive signal may be at least 2 to 10 times background hybridization. Exemplary stringent hybridization conditions include the following: 50%>formamide, 5×SSC, and 1% SDS, incubating at 42° C., or, 5×SSC, 1% SDS, incubating at 65° C., with wash in 0.2×SSC, and 0.1% SDS at 65° C.

u. Substantially Complementary

[0069] “Substantially complementary” as used herein may mean that a first sequence is at least 60%, 65%, 70%, 75%, 80%, 85%, 90%, 95%, 97%, 98% or 99% identical to the complement of a second sequence over a region of 8, 9, 10, 11, 12, 13, 14, 15, 16, 17, 18, 19, 20, 21, 22, 23, 24, 25, 30, 35, 40, 45, 50, 55, 60, 65, 70, 75, 80, 85, 90, 95, 100 or more nucleotides or amino acids, or that the two sequences hybridize under stringent hybridization conditions.

v. Substantially Identical

[0070] “Substantially identical” as used herein may mean that a first and second sequence are at least 60%, 65%, 70%, 75%, 80%, 85%, 90%, 95%, 97%, 98% or 99% identical over a region of 8, 9, 10, 11, 12, 13, 14, 15, 16, 17, 18, 19, 20, 21, 22, 23, 24, 25, 30, 35, 40, 45, 50, 55, 60, 65, 70, 75, 80, 85, 90, 95, 100 or more nucleotides or amino acids, or with respect to nucleic acids, if the first sequence is substantially complementary to the complement of the second sequence.

w. Target Protein

[0071] “Target protein” as used herein is meant to refer to peptides and protein which are part of vaccines or which are encoded by gene constructs of DNA vaccines that act as target proteins for an immune response. The terms “target protein” and “immunogen” are used interchangeably and refer to a protein against which an immune response can be elicited. The target protein is an immunogenic protein that shares at least an epitope with a protein from the pathogen or undesirable cell-type such as a cancer cell or a cell involved in autoimmune disease against which an immune response is desired. The immune response directed against the target protein will protect the individual against and/or treat the individual for the specific infection or disease with which the target protein is associated

x. Variant

[0072] “Variant” used herein with respect to a nucleic acid may mean (i) a portion or fragment of a referenced nucleotide sequence; (ii) the complement of a referenced nucleotide sequence or portion thereof; (iii) a nucleic acid that is substantially identical to a referenced nucleic acid or the complement thereof; or (iv) a nucleic acid that hybridizes under stringent conditions to the referenced nucleic acid, complement thereof, or a sequences substantially identical thereto.

[0073] “Variant” with respect to a peptide or polypeptide that differs in amino acid sequence by the insertion, deletion, or conservative substitution of amino acids, but retain at least one biological activity. Variant may also mean a protein with an amino acid sequence that is substantially identical to a referenced protein with an amino acid sequence that retains at least one biological activity. A conservative substitution of an amino acid, i.e., replacing an amino acid with a different amino acid of similar properties (e.g., hydrophilicity, degree and distribution of charged regions) is recognized in the art as typically involving a minor change. These minor changes can be identified, in part, by considering the hydropathic index of amino acids, as understood in the art. Kyte et al., J. Mol. Biol. 157:105-132 (1982). The hydropathic index of an amino acid is based on a consideration of its hydrophobicity and charge. It is known in the art that amino acids of similar hydropathic indexes can be substituted and still retain protein function. In one aspect, amino acids having hydropathic indexes of 2 are substituted. The hydrophilicity of amino acids can also be used to reveal substitutions that would result in proteins retaining biological function. A consideration of the hydrophilicity of amino acids in the context of a peptide permits calculation of the greatest local average hydrophilicity of that peptide, a useful measure that has been reported to correlate well with antigenicity and immunogenicity. U.S. Pat. No. 4,554,101, incorporated fully herein by reference.

[0074] Substitution of amino acids having similar hydrophilicity values can result in peptides retaining biological activity, for example immunogenicity, as is understood in the art. Substitutions may be performed with amino acids having hydrophilicity values within ±2 of each other. Both the hydrophobicity index and the hydrophilicity value of amino acids are influenced by the particular side chain of that amino acid. Consistent with that observation, amino acid substitutions that are compatible with biological function are understood to depend on the relative similarity of the amino acids, and particularly the side chains of those amino acids, as revealed by the hydrophobicity, hydrophilicity, charge, size, and other properties

y. Vector

[0075] “Vector” used herein may mean a nucleic acid sequence containing an origin of replication. A vector may be a plasmid, bacteriophage, bacterial artificial chromosome or yeast artificial chromosome. A vector may be a DNA or R A vector. A vector may be either a self-replicating extrachromosomal vector or a vector which integrates into a host genome.

### 2. LS-3 Epitope

[0076] Provided herein is LS-3 construct which encodes a HLA-IAb helper epitope LS-3 from Aquifex aeolicus. The LS-3 epitope can comprise the sequence: LRFGIVASRANHALV (SEQ ID NO: 1) and a LS-3 construct can comprise a nucleic acid sequence comprising the sequence CTGAGGTTCGGCATCGTGGCCAGCAGGGCCAACCACGCCCTGGTG (SEQ ID NO: 2). In some embodiments, the LS-3 epitope is encoded by a construct comprising a coding sequence on one plasmid. In some embodiments, the construct comprises promoter.

[0077] The LS-3 nucleic acid sequence (SEQ ID NO: 2) can optimized for human expression. The sequence have lower homology with the host genome to change the RNA structure and avoid cryptic regulation sequences. The sequences provide improved mRNA stability and expression.

[0078] Provided herein is a vector that is capable of expressing the LS-3 constructs in the cell of a mammal in a quantity effective to modulate an immune response in the mammal. Each vector may comprise heterologous nucleic acid encoding the one or both subunits. The vector may be a plasmid. The plasmid may be useful for transfecting cells with nucleic acid encoding the LS-3 epitope, which the transformed host cell is cultured and maintained under conditions wherein expression of the LS-3 epitope takes place.

[0079] The plasmid may comprise a nucleic acid encoding one or more antigens. The plasmid may further comprise an initiation codon, which may be upstream of the coding sequence, and a stop codon, which may be downstream of the coding sequence. The initiation and termination codon may be in frame with the coding sequence.

[0080] The plasmid may also comprise a promoter that is operably linked to the coding sequence The promoter operably linked to the coding sequence may be a promoter from simian virus 40 (SV40), a mouse mammary tumor virus (MMTV) promoter, a human immunodeficiency virus (HIV) promoter such as the bovine immunodeficiency virus (BIV) long terminal repeat (LTR) promoter, a Moloney virus promoter, an avian leukosis virus (ALV) promoter, a cytomegalovirus (CMV) promoter such as the CMV immediate early promoter, Epstein Barr virus (EBV) promoter, or a Rous sarcoma virus (RSV) promoter. The promoter may also be a promoter from a human gene such as human actin, human myosin, human hemoglobin, human muscle creatine, or human metalothionein. The promoter may also be a tissue specific promoter, such as a muscle or skin specific promoter, natural or synthetic. Examples of such promoters are described in US patent application publication no. US20040 175727, the contents of which are incorporated by reference herein in its entirety.

[0081] The plasmid may also comprise a polyadenylation signal, which may be downstream of the coding sequence. The polyadenylation signal may be a SV40 polyadenylation signal, LTR polyadenylation signal, bovine growth hormone (bGH) polyadenylation signal, human growth hormone (hGH) polyadenylation signal, or human β-globin polyadenylation signal. The SV40 polyadenylation signal may be a polyadenylation signal from a pCEP4 plasmid (Invitrogen, San Diego, Calif.).

[0082] The plasmid may also comprise an enhancer upstream of the coding sequence. The enhancer may be human actin, human myosin, human hemoglobin, human muscle creatine or a viral enhancer such as one from CMV, FMDV, RSV or EBV. Polynucleotide function enhances are described in U.S. Pat. Nos. 5,593,972, 5,962,428, and WO94/016737, the contents of each are fully incorporated by reference in their entireties.

[0083] The plasmid may also comprise a mammalian origin of replication in order to maintain the plasmid extrachromosomally and produce multiple copies of the plasmid in a cell. The plasmid may be pVAX1, pCEP4 or pREP4 from Invitrogen (San Diego, Calif.), which may comprise the Epstein Barr virus origin of replication and nuclear antigen EBNA-1 coding region, which may produce high copy episomal replication without integration. The backbone of the plasmid may be pAV0242. The plasmid may be a replication defective adenovirus type 5 (Ad5) plasmid.

[0084] The plasmid may also comprise a regulatory sequence, which may be well suited for gene expression in a cell into which the plasmid is administered. The coding sequence may comprise a codon that may allow more efficient transcription of the coding sequence in the host cell.

[0085] The coding sequence may also comprise an Ig leader sequence. The leader sequence may be 5′ of the coding sequence. The consensus antigens encoded by this sequence may comprise an N-terminal Ig leader followed by a consensus antigen protein. The N-terminal Ig leader may be IgE or IgG.

[0086] The plasmid may be pSE420 (Invitrogen, San Diego, Calif.), which may be used for protein production in Escherichia coli (E. coli). The plasmid may also be pYES2 (Invitrogen, San Diego, Calif.), which may be used for protein production in Saccharomyces cerevisiae strains of yeast. The plasmid may also be of the MAXBAC™ complete baculovirus expression system (Invitrogen, San Diego, Calif.), which may be used for protein production in insect cells. The plasmid may also be pcDNA I or pcDNA3 (Invitrogen, San Diego, Calif.), which maybe used for protein production in mammalian cells such as Chinese hamster ovary (CHO) cells.

[0087] 4. Vaccine

[0088] According to some embodiments of the invention, the delivery of a nucleic acid sequence that encodes the LS-3 epitope or functional fragments thereof, in combination with a nucleic acid sequence that encodes an immunogen to an individual enhances the immune response against the immunogen. When the nucleic acid molecules that encode the immunogens and LS-3 are taken up by cells of the individual, the immunogen and LS-3 are expressed in cells and the proteins are thereby delivered to the individual. Aspects of the invention provide methods of delivering the coding sequences of the immunogen and LS-3 on a single nucleic acid molecule, methods of delivering the coding sequences of the immunogen and LS-3 on different nucleic acid molecules and methods of delivering the coding sequences of the proteins as part of recombinant vaccines and as part of attenuated vaccines.

[0089] According to some aspects of the present invention, compositions and methods are provided which prophylactically and/or therapeutically immunize an individual against a pathogen or abnormal, disease-related cells. The vaccine may be any type of vaccine such as, a live attenuated vaccine, a recombinant vaccine or a nucleic acid or DNA vaccine. By delivering nucleic acid molecules that encode an immunogen and LS-3 epitope or functional fragments thereof the immune response induced by the vaccine may be modulated. The LS-3 constructs are particularly useful when delivered in combination with a nucleic acid molecule that encodes an immunogen such as for example as part of a plasmid or the genome of a recombinant vector or attenuated pathogen or cell. The LS-3 constructs may be used in vaccines prophylactically in order to induce a protective immune response in an uninfected or disease free individual. LS-3 constructs are particularly useful when delivered to induce a protective immune response in humans. The LS-3 constructs may be used in vaccines therapeutically in order to induce a immune response in an infected or diseased individual. The LS-3 constructs are particularly useful when delivered to induce a therapeutic immune response in humans. In some embodiments, nucleic acid molecules comprising the LS-3 constructs are delivered in a cell free composition. In some embodiments, nucleic acid molecules comprising the LS-3 constructs are delivered in a composition free of cancer cells. In some embodiments, comprising the LS-3 constructs are administered free of any other cytokine.

[0090] Provided herein are vaccine capable of generating in a mammal an immune response against pathogens, immunogens expressed on cells associated with disease and other immunogens against which an immune response is desired. The vaccine may comprise each plasmid as discussed above. The vaccine may comprise a plurality of the plasmids, or combinations thereof. The vaccine may be provided to induce a therapeutic or prophylactic immune response.

[0091] Genetic constructs may comprise a nucleotide sequence that encodes a target protein or an immunomodulating protein operably linked to regulatory elements needed for gene expression. According to the invention, combinations of gene constructs that include one construct that comprises an expressible form of the nucleotide sequence that encodes a target protein and one construct that includes an expressible form of the nucleotide sequence that encodes an immunomodulating protein are provided. Delivery into a living cell of the DNA or RNA molecule(s) that include the combination of gene constructs results in the expression of the DNA or RNA and production of the target protein and one or more immunomodulating proteins. An enhanced immune response against the target protein results.

[0092] The present invention may be used to immunize an individual against pathogens such as viruses, prokaryote and pathogenic eukaryotic organisms such as unicellular pathogenic organisms and multicellular parasites. The present invention is particularly useful to immunize an individual or subject against those pathogens which infect cells and which are not encapsulated such as viruses, and prokaryote such as gonorrhea, listeria and shigella. In addition, the present invention is also useful to immunize an individual against protozoan pathogens that include a stage in the life cycle where they are intracellular pathogens. Table 1 provides a listing of some of the viral families and genera for which vaccines according to the present invention can be made. DNA constructs that comprise DNA sequences that encode the peptides that comprise at least an epitope identical or substantially similar to an epitope displayed on a pathogen antigen such as those antigens listed on the tables are useful in vaccines. Moreover, the present invention is also useful to immunize an individual against other pathogens including prokaryotic and eukaryotic protozoan pathogens as well as multicellular parasites such as those listed on Table 2.

### Table 1—Viruses

### Picornavirus Family

[0093] Genera:

[0094] Pvhinoviruses: (Medical) responsible for −50% cases of the common cold.

[0095] Ethero viruses: (Medical) includes polioviruses, coxsackieviruses, echoviruses, and human enteroviruses such as hepatitis A virus.

[0096] Apthoviruses: (Veterinary) these are the foot and mouth disease viruses.

[0097] Target antigens: VP1, VP2, VP3, VP4, VPG

### Calcivirus Family

[0098] Genera:

[0099] Norwalk Group of Viruses: (Medical) these viruses are an important causative agent of epidemic gastroenteritis.

### Togavirus Family

[0100] Genera:
[0101] Alphaviruses: (Medical and Veterinary) examples include Sindbis virus, RossRiver virus
   and Venezuelan Eastern & Western Equine encephalitis viruses.

[0102] Reovirus: (Medical) Rubella virus.

### Flariviridae Family

[0103] Examples include: (Medical) dengue, yellow fever, Japanese encephalitis, St. Louis encephalitis and tick borne encephalitis viruses. West Nile virus (Genbank NC001563, AF533540, AF404757, AF404756, AF404755, AF404754, AF404753, AF481864, M12294, AF317203, AF196835, AF260969, AF260968, AF260967, AF206518 and AF202541)

[0104] Representative Target antigens: E NS5 C

Hepatitis C Virus: (Medical) these viruses are not placed in a family yet but are believed to be
either a togavirus or a flavivirus. Most similarity is with togavirus family.

### Coronavirus Family: (Medical and Veterinary)

[0105] Infectious bronchitis virus (poultry)

[0106] Porcine transmissible gastroenteric virus (pig)
[0107] Porcine hemagglutinating encephalomyelitis virus (pig)
[0108] Feline infectious peritonitis virus (cats)
[0109] Feline enteric coronavirus (cat)
[0110] Canine coronavirus (dog)
[0111] SARS associated coronavirus
[0112] The human respiratory coronaviruses cause about 40% of cases of common cold. EX. 224E, OC43 Note—coronaviruses may cause non-A, B or C hepatitis
[0113] Target antigens: E1—also called M or matrix protein E2—also called S or Spike protein
   E3—also called BE or hemagglutin-elterose glycoprotein (not present in all coronaviruses)

### N—

[0114] nucleocapsid

### Rhabdovirus Family

[0115] Genera:

[0116] Vesiculovirus, Lyssavirus: (medical and veterinary) rabies

[0117] Target antigen: G protein, N protein

### Filoviridae Family: (Medical)

[0118] Hemorrhagic fever viruses such as Marburg and Ebola virus

### Paramyxovirus Family:

[0119] Genera:

[0120] Paramyxovirus: (Medical and Veterinary) Mumps virus, New Castle disease virus (important pathogen in chickens)

[0121] Morbillivirus: (Medical and Veterinary) Measles, canine distemper

[0122] Pneumovirus: (Medical and Veterinary) Respiratory syncytial virus

Orthomyxovirus Family (Medical) The Influenza virus

### Bunyavirus Family

[0123] Genera:

[0124] Bunyavirus: (Medical) California encephalitis, La Crosse

[0125] Phlebovirus: (Medical) Rift Valley Fever

[0126] Hantavirus: Puremala is a hemahagin fever virus

[0127] Nairvirus (Veterinary) Nairobi sheep disease

[0128] Also many unassigned bungaviruses

Arenavirus Family (Medical) LCM, Lassa fever virus

### Reovirus Family

[0129] Genera:

[0130] Reovirus: a possible human pathogen

[0131] Rotavirus: acute gastroenteritis in children

[0132] Orbiviruses: (Medical and Veterinary) Colorado Tick fever,

[0133] Lebombo (humans) equine encephalosis, blue tongue

### Retroyirus Family

[0134] Sub-Family:

[0135] Oncorivirinal: (Veterinary) (Medical) feline leukemia virus, HTLVI and HTLVII

[0136] Lentivirinal: (Medical and Veterinary) HIV, feline immunodeficiency virus, equine infections, anemia virus

### Spumavirinal Papovavirus Family

[0137] Sub-Family:

[0138] Polyomaviruses: (Medical) BKU and JCU viruses

[0139] Sub-Family:

[0140] Papillomavirus: (Medical) many viral types associated with cancers or malignant progression of papilloma.

[0141] Adenovirus (Medical) EX AD7, ARD., O.B.—cause respiratory disease—some adenoviruses such as 275 cause enteritis

### Parvovirus Family (Veterinary)

[0142] Feline parvovirus: causes feline enteritis

[0143] Feline panleucopeniavirus

[0144] Canine parvovirus

[0145] Porcine parvovirus

### Herpesvirus Family

[0146] Sub-Family:

[0147] alphaherpesviridue

[0148] Genera:

[0149] Simplexvirus (Medical)

[0150] HSVI (Genbank X141 12, NC001806),

[0151] HSVII (NC001798)

[0152] Varicella zoster: (Medical Veterinary)

[0153] Pseudorabies

[0154] varicella zoster

[0155] Sub-Family

[0156] betaherpesviridae

[0157] Genera:

[0158] Cytomegalovirus (Medical)

[0159] HCMV

[0160] Muromegalovirus

[0161] Sub-Family.

[0162] Gammaherpesviridae

[0163] Genera:

[0164] Lymphocryptovirus (Medical)

[0165] EBV—(Burkitt's lymphoma)

### Poxvirus Family

[0166] Sub-Family:

[0167] Chordopoxviridae (Medical—Veterinary)

[0168] Genera:

[0169] Variola (Smallpox)

[0170] Vaccinia (Cowpox)

[0171] Parapoxivirus—Veterinary

[0172] Auipoxvirus—Veterinary

[0173] Capripoxvirus

[0174] Leporipoxvirus

[0175] Suipoxviru's

[0176] Sub-Family:

[0177] Entemopoxviridue

### Hepadnavirus Family

[0178] Hepatitis B virus

[0179] Unclassified Hepatitis delta virus

### Table 2

[0180] Bacterial pathogens

[0181] Pathogenic gram-positive cocci include: pneumococcal; staphylococcal;

and streptococcal.

[0182] Pathogenic gram-negative cocci include: meningococcal; and gonococcal.

[0183] Pathogenic enteric gram-negative bacilli include: enterobacteriaceae; pseudomonas, acinetobacteria and eikenella, melioidosis; salmonella; shigellosis; haemophilus; chancroid; brucellosis; tularemia; yersinia (pasteurella); streptobaciUus mortiliformis and spirillum; listeria monocytogenes; erysipelothrix rhusiopathiae; diphtheria, cholera, anthrax; donovanosis (granuloma inguinale); and bartonellosis.

[0184] Pathogenic anaerobic bacteria include: tetanus; botulism; other Clostridia; tuberculosis; leprosy; and other mycobacteria.

[0185] Pathogenic spirochetal diseases include: syphilis;—treponematoses: yaws, pinta and endemic syphilis; and leptospirosis.

[0186] Other infections caused by higher pathogen bacteria and pathogenic fungi include: actinomycosis; nocardiosis; cryptococcosis, blastomycosis, histoplasmosis and coccidioidomycosis; candidiasis, aspergillosis, and mucormycosis; sporotrichosis; paracoccidiodomycosis, petriellidiosis, torulopsosis, mycetoma, and chromomycosis; and dermatophytosis.

[0187] Rickettsial infections include rickettsial and rickettsioses.

[0188] Examples of mycoplasma and chlamydial infections include: Mycoplasma pneumoniae; lymphogranuloma venereum; psittacosis; and perinatal chlamydial infections.

[0189] Pathogenic eukaryotes

[0190] Pathogenic protozoans and helminths and infections thereby include: amebiasis; malaria; leishmaniasis; trypanosomiasis; toxoplasmosis; Pneumocystis carinii; babesiosis; giardiasis; trichinosis; filariasis; schistosomiasis; nematodes; trematodes or flukes; and cestode (tapeworm) infections.

[0191] In order to produce a genetic vaccine to protect against pathogen infection, genetic material that encodes immunogenic proteins against which a protective immune response can be mounted must be included in a genetic construct as the coding sequence for the target. Because DNA and RNA are both relatively small and can be produced relatively easily, the present invention provides the additional advantage of allowing for vaccination with multiple pathogen antigens. The genetic construct used in the genetic vaccine can include genetic material that encodes many pathogen antigens. For example, several viral genes may be included in a single construct thereby providing multiple targets.

[0192] Tables 1 and 2 include lists of some of the pathogenic agents and organisms for which genetic vaccines can be prepared to protect an individual from infection by them.

[0193] In some embodiments, vaccines comprise the optimized LS-3 nucleic acid sequence in combination with one or more DNA vaccine constructs set forth in the following patent documents which are each incorporated herein by reference. In some embodiments, vaccines comprise the optimized LS-3 in combination with (human immunodeficiency virus) an HIV vaccine, an (hepatitis C virus) HCV vaccine, a human papilloma virus (HPV) vaccine, an influenza vaccine or an hTERT-targeted cancer vaccines as disclosed in PCT application PCT/US07/74769 and corresponding U.S. patent application Ser. No. 12/375,518. In some embodiments, vaccines comprise the optimized IL-12 in combination with an Influenza vaccines disclosed in PCT application PCT/US08/83281 and corresponding U.S. patent application Ser. No. 12/269,824 or PCT application PCT/US11/22642 and corresponding U.S. patent application Ser. No. 12/694,238. In some embodiments, vaccines comprise the optimized IL-12 in combination with an HCV vaccines disclosed in PCT application PCT/US08/081627 and corresponding U.S. patent application Ser. No. 13/127,008. In some embodiments, vaccines comprise the optimized LS-3 in combination with an HPV vaccines disclosed in PCT application.

[0194] PCT/US10/21869 and corresponding U.S. patent application Ser. No. 12/691,588 or U.S. provisional application Ser. No. 61/442,162. In some embodiments, vaccines comprise the optimized LS-3 in combination with an Smallpox vaccines disclosed in PCT application PCT/US09/045420 and corresponding U.S. patent application Ser. No. 12/473,634. In some embodiments, vaccines comprise the optimized LS-3 in combination with an Chikungunya vaccines disclosed in PCT application PCT/US09/039656 and corresponding U.S. patent application Ser. No. 12/936,186. In some embodiments, vaccines comprise the optimized LS-3 in combination with an foot and mouth disease virus (FMDV) vaccines disclosed in PCT application PCT/US10/55187. In some embodiments, vaccines comprise the optimized LS-3 in combination with an Malaria vaccines disclosed in U.S. provisional application Ser. No. 61/386,973. In some embodiments, vaccines comprise the optimized LS-3 in combination with an prostate cancer vaccines disclosed in U.S. provisional application Ser. No. 61/413,176 or U.S. provisional application Ser. No. 61/417,817. In some embodiments, vaccines comprise the optimized LS-3 in combination with an human cytomegalovirus (CMV) vaccines disclosed in U.S. provisional application Ser. No. 61/438,089. In some embodiments, vaccines comprise the optimized LS-3 in combination with Methicillin-Resistant Staphylococcus aureus (MRSA) vaccines disclosed in U.S. Provisional Application Ser. No. 61/569,727, filed on Dec. 12, 2011, entitled “PROTEINS COMPRISING MRSA PBP2A AND FRAGMENTS THEREOF, NUCLEIC ACIDS ENCODING THE SAME, AND COMPOSITIONS AND THEIR USE TO PREVENT AND TREAT MRSA INFECTIONS” and designated attorney docket number 133172.04000 (X5709) and its corresponding PCT Application claiming priority to U.S. Provisional Application Ser. No. 61/569,727, filed on the same day as the application filed herewith, each of which incorporate by reference in their entireties. All patents and patent applications disclosed herein are incorporated by reference in their entireties.

[0195] Another aspect of the present invention provides a method of conferring a protective immune response against hyperproliferating cells that are characteristic in hyperproliferative diseases and to a method of treating individuals suffering from hyperproliferative diseases. Examples of hyperproliferative diseases include all forms of cancer and psoriasis.

[0196] It has been discovered that introduction of a genetic construct that includes a nucleotide sequence which encodes an immunogenic “hyperproliferating cell”-associated protein into the cells of an individual results in the production of those proteins in the vaccinated cells of an individual. To immunize against hyperproliferative diseases, a genetic construct that includes a nucleotide sequence that encodes a protein that is associated with a hyperproliferative disease is administered to an individual. In some embodiments, the hyperproliferative disease is cancer.

[0197] In order for the hyperproliferative-associated protein to be an effective immunogenic target, it must be a protein that is produced exclusively or at higher levels in hyperproliferative cells as compared to normal cells. Target antigens include such proteins, fragments thereof and peptides; which comprise at least an epitope found on such proteins. In some cases, a hyperproliferative-associated protein is the product of a mutation of a gene that encodes a protein. The mutated gene encodes a protein that is nearly identical to the normal protein except it has a slightly different amino acid sequence which results in a different epitope not found on the normal protein. Such target proteins include those which are proteins encoded by oncogenes such as myb, myc, fyn, and the translocation gene bcr/abl, ras, src, P53, neu, trk and EGRF. In addition to oncogene products as target antigens, target proteins for anti-cancer treatments and protective regimens include variable regions of antibodies made by B cell lymphomas and variable regions of T cell receptors of T cell lymphomas which, in some embodiments, are also used target antigens for autoimmune disease. Other tumor-associated proteins can be used as target proteins such as proteins that are found at higher levels in tumor cells including the protein recognized by monoclonal antibody 17-IA and folate binding proteins or PSA.

[0198] While the present invention may be used to immunize an individual against one or more of several forms of cancer, the present invention is particularly useful to prophylactically immunize an individual who is predisposed to develop a particular cancer or who has had cancer and is therefore susceptible to a relapse. Developments in genetics and technology as well as epidemiology allow for the determination of probability and risk assessment for the development of cancer in individual. Using genetic screening and/or family health histories, it is possible to predict the probability a particular individual has for developing any one of several types of cancer.

[0199] Similarly, those individuals who have already developed cancer and who have been treated to remove the cancer or are otherwise in remission are particularly susceptible to relapse and reoccurrence. As part of a treatment regimen, such individuals can be immunized against the cancer that they have been diagnosed as having had in order to combat a recurrence. Thus, once it is known that an individual has had a type of cancer and is at risk of a relapse, they can be immunized in order to prepare their immune system to combat any future appearance of the cancer.

[0200] The present invention provides a method of treating individuals suffering from hyperproliferative diseases. In such methods, the introduction of genetic constructs serves as an immunotherapeutic, directing and promoting the immune system of the individual to combat hyperproliferative cells that produce the target protein. In treating or preventing cancer, embodiments which are free of cells are particularly useful.

[0201] The present invention provides a method of treating individuals suffering from autoimmune diseases and disorders by conferring a broad based protective immune response against targets that are associated with autoimmunity including cell receptors and cells which produce “self-directed antibodies.

[0202] T cell mediated autoimmune diseases include Rheumatoid arthritis (RA), multiple sclerosis (MS), Sjogren's syndrome, sarcoidosis, insulin dependent diabetes mellitus (IDDM), autoimmune thyroiditis, reactive arthritis, ankylosing spondylitis, scleroderma, polymyositis, dermatomyositis, psoriasis, vasculitis, Wegener's granulomatosis, Crohn's disease and ulcerative colitis. Each of these diseases is characterized by T cell receptors that bind to endogenous antigens and initiate the inflammatory cascade associated with autoimmune diseases.

Vaccination against the variable region of the T cells would elicit an immune response including CTLs to eliminate those T cells.

[0203] In RA, several specific variable regions of T cell receptors (TCRs) that are involved in the disease have been characterized. These TCRs include ν β-3, ν β-14, 20 ν β-17 and Va-17. Thus, vaccination with a DNA construct that encodes at least one of these proteins will elicit an immune response that will target T cells involved in RA. See: Howell, M. D., et al., 1991 Proc. Nat. Acad. Sci. USA 88:10921-10925; Piliard, X., et al, 1991 Science 253:325-329; Williams, W. V., et al, 1992 J Clin. Invest. 90:326-333; each of which is incorporated herein by reference. In MS, several specific variable regions of TCRs that are involved in the disease have been characterized. These TCRs include ν β-7, and Va-10. Thus, vaccination with a DNA construct that encodes LS-3 epitope and at least one of these proteins will elicit an immune response that will target T cells involved in MS. See: Wucherpfennig, K. W., et al, 1990 Science 248:1016-1019; Oksenberg, J. R., et al, 1990 Nature 345:344-346; each of which is incorporated herein by reference.

[0204] In scleroderma, several specific variable regions of TCRs that are involved in the disease have been characterized. These TCRs include ν β-6, ν β-8, V β-14 and Va-16, Va-3C, Va-7, Va-14, Va-15, Va-16, Va-28 and Va-12. Thus, vaccination with a DNA construct that encodes LS-3 epitope and at least one of these proteins will elicit an immune response that will target T cells involved in scleroderma.

[0205] In order to treat patients suffering from a T cell mediated autoimmune disease, particularly those for which the variable region of the TCR has yet to be characterized, a synovial biopsy can be performed. Samples of the T cells present can be taken and the variable region of those TCRs identified using standard techniques. Genetic vaccines can be prepared using this information.

[0206] B cell mediated autoimmune diseases include Lupus (SLE), Grave's disease, myasthenia gravis, autoimmune hemolytic anemia, autoimmune thrombocytopenia, asthma, cryoglobulinemia, primary biliary sclerosis and pernicious anemia. Each of these diseases is characterized by antibodies that bind to endogenous antigens and initiate the inflammatory cascade associated with autoimmune diseases. Vaccination against the variable region of antibodies would elicit an immune response including CTLs to eliminate those B cells that produce the antibody.

[0207] In order to treat patients suffering from a B cell mediated autoimmune disease, the variable region of the antibodies involved in the autoimmune activity must be identified. A biopsy can be performed and samples of the antibodies present at a site of inflammation can be taken. The variable region of those antibodies can be identified using standard techniques. Genetic vaccines can be prepared using this information.

[0208] In the case of SLE, one antigen is believed to be DNA. Thus, in patients to be immunized against SLE, their sera can be screened for anti-DNA antibodies and a vaccine can be prepared which includes DNA constructs that encode the variable region of such anti-DNA antibodies found in the sera.

[0209] Common structural features among the variable regions of both TCRs and antibodies are well known. The DNA sequence encoding a particular TCR or antibody can generally be found following well known methods such as those described in Kabat, et al 1987 Sequence of Proteins of Immunological Interest U.S. Department of Health and Human Services, Bethesda Md., which is incorporated herein by reference. In addition, a general method for cloning functional variable regions from antibodies can be found in Chaudhary, V. K., et al, 1990 Proc. Natl. Acad Sci. USA 87:1066, which is incorporated herein by reference.

[0210] In addition to using expressible forms of immunomodulating protein coding sequences to improve genetic vaccines, the present invention relates to improved attenuated live vaccines and improved vaccines that use recombinant vectors to deliver foreign genes that encode antigens. Examples of attenuated live vaccines and those using recombinant vectors to deliver foreign antigens are described in U.S. Pat. Nos. 4,722,848; 5,017,487; 5,077,044; 5,110,587; 5,112,749; 5,174,993; 5,223,424; 5,225,336; 5,240,703; 5,242,829; 5,294,441; 5,294,548; 5,310,668; 5,387,744; 5,389,368; 5,424,065; 5,451,499; 5,453,364; 5,462,734; 5,470,734; and 5,482,713, which are each incorporated herein by reference. Gene constructs are provided which include the nucleotide sequence of the LS-3 constructs or functional fragments thereof, wherein the nucleotide sequence is operably linked to regulatory sequences that can function in the vaccine to effect expression. The gene constructs are incorporated in the attenuated live vaccines and recombinant vaccines to produce improved vaccines according to the invention.

[0211] The vaccine may further comprise a pharmaceutically acceptable excipient. The pharmaceutically acceptable excipient may be functional molecules as vehicles, adjuvants, carriers, or diluents. The pharmaceutically acceptable excipient may be a transfection facilitating agent, which may include surface active agents, such as immune-stimulating complexes (ISCOMS), Freunds incomplete adjuvant, LPS analog including monophosphoryl lipid A, muramyl peptides, quinone analogs, vesicles such as squalene and squalene, hyaluronic acid, lipids, liposomes, calcium ions, viral proteins, polyanions, polycations, or nanoparticles, or other known transfection facilitating agents.

[0212] The transfection facilitating agent is a polyanion, polycation, including poly-L-glutamate (LGS), or lipid. The transfection facilitating agent is poly-L-glutamate, and more preferably, the poly-L-glutamate is present in the vaccine at a concentration less than 6 mg/ml. The transfection facilitating agent may also include surface active agents such as immune-stimulating complexes (ISCOMS), Freunds incomplete adjuvant, LPS analog including monophosphoryl lipid A, muramyl peptides, quinone analogs and vesicles such as squalene and squalene, and hyaluronic acid may also be used administered in conjunction with the genetic construct. In some embodiments, the DNA plasmid vaccines may also include a transfection facilitating agent such as lipids, liposomes, including lecithin liposomes or other liposomes known in the art, as a DNA-liposome mixture (see for example WO9324640), calcium ions, viral proteins, polyanions, polycations, or nanoparticles, or other known transfection facilitating agents. Preferably, the transfection facilitating agent is a polyanion, polycation, including poly-L-glutamate (LGS), or lipid. Concentration of the transfection agent in the vaccine is less than 4 mg/ml, less than 2 mg/ml, less than 1 mg/ml, less than 0.750 mg/ml, less than 0.500 mg/ml, less than 0.250 mg/ml, less than 0.100 mg/ml, less than 0.050 mg/ml, or less than 0.010 mg/ml.

[0213] The pharmaceutically acceptable excipient may be one or more additional adjuvants. An adjuvant may be other genes that are expressed from the same or from an alternative plasmid or are delivered as proteins in combination with the plasmid above in the vaccine. The one or more adjuvants may be proteins and/or nucleic acid molecules that encode proteins selected from the group consisting of: PADRE, a-interferon (IFN-a), β-interferon (IFN-β), γ-interferon, platelet derived growth factor (PDGF), TNFa, TNFp, GM-CSF, epidermal growth factor (EGF), cutaneous T cell-attracting chemokine (CTACK), epithelial thymus-expressed chemokine (TECK), mucosae-associated epithelial chemokine (MEC), IL-15 including IL-15 having the signal sequence or coding sequence that encodes the signal sequence deleted and optionally including a different signal peptide such as that from IgE or coding sequence that encodes a difference signal peptide such as that from IgE, IL-28, MHC, CD80, CD86, IL-1, IL-2, IL-4, IL-5, IL-6, IL-10, IL-18, IL-12, MCP-1, MIP-1α, MIP-Iβ, IL-8, L-selectin, P-selectin, E-selectin, CD34, GlyCAM-1, MadCAM-1, LFA-1, VLA-1, Mac-1, p150.95, PECAM, ICAM-1, ICAM-2, ICAM-3, CD2, LFA-3, M-CSF, G-CSF, mutant forms of IL-18, CD40, CD40L, vascular growth factor, fibroblast growth factor, IL-7, nerve growth factor, vascular endothelial growth factor, Fas, TNF receptor, Fit, Apo-1, p55, WSL-1, DR3, TRAMP, Apo-3, AIR, LARD, NGRF, DR4, DR5, KILLER, TRAIL-R2, TRICK2, DR6, Caspase ICE, Fos, c-jun, Sp-1, Ap-1, Ap-2, p38, p65Rel, MyD88, IRAK, TRAF6, IkB, Inactive NIK, SAP K, SAP-1, JNK, interferon response genes, NFkB, Bax, TRAIL, TRAILrec, TRAILrecDRC5, TRAIL-R3, TRAIL-R4, RANK, RANK LIGAND, Ox40, Ox40 LIGAND, NKG2D, MICA, MICB, NKG2A, NKG2B, NKG2C, NKG2E, NKG2F, TAP1, TAP2 and functional fragments thereof or a combination thereof. In some embodiments, an additional adjuvant may be one or more proteins and/or nucleic acid molecules that encode proteins selected from the group consisting of: IL-15, IL-28, CTACK, TECK, MEC or RANTES. Examples of IL-15 constructs and sequences are disclosed in PCT application no. PCT/US04/18962 and corresponding U.S. application Ser. No. 10/560,650, and in PCT application no. PCT/US07/00886 and corresponding U.S. application Ser. No. 12/160,766, and in PCT application no. PCT/US Ser. No. 10/048,827. Examples of IL-28 constructs and sequences are disclosed in PCT application no. PCT/US09/039648 and corresponding U.S. application Ser. No. 12/936,192. Examples of RANTES and other constructs and sequences are disclosed in PCT application no. PCT/US 1999/004332 and corresponding U.S. application Ser. No. 09/622,452. Other examples of RANTES constructs and sequences are disclosed in PCT application no. PCT/US11/024098. Examples of RANTES and other constructs and sequences are disclosed in PCT application no. PCT/US 1999/004332 and corresponding U.S. application Ser. No. 09/622,452. Other examples of RANTES constructs and sequences are disclosed in PCT application no. PCT/US11/024098. Examples of chemokines CTACK, TECK and MEC constructs and sequences are disclosed in PCT application no. PCT/US2005/042231 and corresponding U.S. application Ser. No. 11/719,646. Examples of OX40 and other immunomodulators are disclosed in U.S. application Ser. No. 10/560,653. Examples of DR5 and other immunomodulators are disclosed in U.S. application Ser. No. 09/622,452.

[0214] The vaccine may further comprise a genetic vaccine facilitator agent as described in U.S. Pat. No. 5,962,428, which is fully incorporated by reference in its entirety.

[0215] The vaccine may comprise the consensus antigens and plasmids at quantities of from about 1 nanogram to 100 milligrams; about 1 microgram to about 10 milligrams; or preferably about 0.1 microgram to about 10 milligrams; or more preferably about 1 milligram to about 2 milligram. In some preferred embodiments, pharmaceutical compositions according to the present invention comprise about 5 nanogram to about 1000 micrograms of DNA. In some preferred embodiments, the pharmaceutical compositions contain about 10 nanograms to about 800 micrograms of DNA. In some preferred embodiments, the pharmaceutical compositions contain about 0.1 to about 500 micrograms of DNA. In some preferred embodiments, the pharmaceutical compositions contain about 1 to about 350 micrograms of DNA. In some embodiments, the pharmaceutical compositions contain about 25 to about 250 micrograms, from about 100 to about 200 microgram, from about 1 nanogram to 100 milligrams; from about 1 microgram to about 10 milligrams; from about 0.1 microgram to about 10 milligrams; from about 1 milligram to about 2 milligram, from about 5 nanogram to about 1000 micrograms, from about 10 nanograms to about 800 micrograms, from about 0.1 to about 500 micrograms, from about 1 to about 350 micrograms, from about 25 to about 250 micrograms, from about 100 to about 200 microgram of the consensus antigen or plasmid thereof.

[0216] The vaccine may be formulated according to the mode of administration to be used. An injectable vaccine pharmaceutical composition may be sterile, pyrogen free and particulate free. An isotonic formulation or solution may be used. Additives for isotonicity may include sodium chloride, dextrose, mannitol, sorbitol, and lactose. The vaccine may comprise a vasoconstriction agent. The isotonic solutions may include phosphate buffered saline. Vaccine may further comprise stabilizers including gelatin and albumin. The stabilizing may allow the formulation to be stable at room or ambient temperature for extended periods of time such as LGS or polycations or polyanions to the vaccine formulation.

### 5. Methods of Delivery the Vaccine

[0217] Provided herein is a method for delivering a vaccine including the LS-3 epitope to produce immune responses effective against the vaccine immunogens. The method of delivering the vaccine or vaccination may be provided to induce a therapeutic and prophylactic immune response. The vaccination process may generate an immune response against immunogens in a subject. The vaccine may be delivered to an individual to modulate the activity of the mammal's immune system and enhance the immune response. The delivery of the vaccine may be the transfection of sequences encoding the immunogen and the LS-3 epitope on one or more nucleic acid molecules. The coding sequences are expressed in cells and delivered to the surface of the cell upon which the immune system recognized and induces a cellular, humoral, or cellular and humoral response. The delivery of the vaccine may be use to induce or elicit and immune response in mammals against the immunogen by administering to the mammals the vaccine as discussed above. The inclusion of the LS-3 epitope results in a more effective immune response.

[0218] Upon delivery of the vaccine and plasmid into the cells of the mammal, the transfected cells will express and secrete immunogens and LS-3 epitope encoded by the plasmids injected from the vaccine. These immunogens will be recognized as foreign by the immune system and antibodies will be made against them. These antibodies will be maintained by the immune system and allow for an effective response to subsequent infections. The presence of the LS-3 epitope encoded by the LS-3 epitope constructs results in a greater immune response.

[0219] The vaccine may be administered to a mammal to elicit an immune response in a mammal. The mammal may be human, primate, non-human primate, cow, cattle, sheep, goat, antelope, bison, water buffalo, bison, bovids, deer, hedgehogs, elephants, llama, alpaca, mice, rats, and chicken.

[0220] a. Combination Treatments

[0221] The LS-3 epitope may be administered in combination with other proteins or genes encoding one or more of alpha-interferon, γ-interferon, platelet derived growth factor (PDGF), TNFa, TNFp, GM-CSF, epidermal growth factor (EGF), cutaneous T cell-attracting chemokine (CTACK), epithelial thymus-expressed chemokine (TECK), mucosae-associated epithelial chemokine (MEC), IL-15 (including IL-15 having the signal sequence deleted and optionally including the signal peptide from IgE), MHC, CD80, CD86, IL-1, IL-2, IL-4, IL-5, IL-6, IL-10, IL-12, IL-18, IL-28, MCP-1, MIP-1α, MIP-Iβ, IL-8, RANTES, L-selectin, P-selectin, E-selectin, CD34, GlyCAM-1, MadCAM-1, LFA-1, VLA-1, Mac-1, p150.95, PECAM, ICAM-1, ICAM-2, ICAM-3, CD2, LFA-3, M-CSF, G-CSF, IL-4, mutant forms of IL-18, CD40, CD40L, vascular growth factor, fibroblast growth factor, IL-7, nerve growth factor, vascular endothelial growth factor, Fas, TNF receptor, Fit, Apo-1, p55, WSL-1, DR3, TRAMP, Apo-3, AIR, LARD, NGRF, DR4, DR5, KILLER, TRAIL-R2, TRICK2, DR6, Caspase ICE, Fos, c-jun, Sp-1, Ap-1, Ap-2, p38, p65Rel, MyD88, IRAK, TRAF6, IkB, Inactive NIK, SAP K, SAP-1, N K, interferon response genes, NFkB, Bax, TRAIL, TRAILrec, TRAILrecDRC5, TRAIL-R3, TRAIL-R4, RANK, RANK LIGAND, Ox40, Ox40 LIGAND, NKG2D, MICA, MICB, NKG2A, NKG2B, NKG2C, NKG2E, NKG2F, TAP1, TAP2 and functional fragments thereof or combinations thereof.

[0222] The vaccine may be administered by different routes including orally, parenterally, sublingually, transdermally, rectally, transmucosally, topically, via inhalation, via buccal administration, intrapleurally, intravenous, intraarterial, intraperitoneal, subcutaneous, intramuscular, intranasal intrathecal, and intraarticular or combinations thereof. For veterinary use, the composition may be administered as a suitably acceptable formulation in accordance with normal veterinary practice. The veterinarian can readily determine the dosing regimen and route of administration that is most appropriate for a particular animal. The vaccine may be administered by traditional syringes, needleless injection devices, “microprojectile bombardment gone guns”, or other physical methods such as electroporation (“EP”), “hydrodynamic method”, or ultrasound.

[0223] The plasmid of the vaccine may be delivered to the mammal by several well known technologies including DNA injection (also referred to as DNA vaccination) with and without in vivo electroporation, liposome mediated, nanoparticle facilitated, recombinant vectors such as recombinant adenovirus, recombinant adenovirus associated virus and recombinant vaccinia. The consensus antigen may be delivered via DNA injection and along with in vivo electroporation.

### 6. Immunomodulating Compositions and Methods

[0224] In some embodiments, the nucleic acid sequences that encode the LS-3 eptiope are delivered without the addition of nucleic acid sequences that encode an immunogen. In some embodiments, the method is free of delivery of a nucleic acid that encodes an immunogen. In such methods, the nucleic acid sequences that encode the LS-3 epitope subunits are used as immunotherapeutics which, when expressed to produce functional LS-3, impart a desired immunomodulatory effect on the individual. The nucleic acid sequences that encode the LS-3 epitope are provided and delivered as described above except for the exclusion of nucleic acid sequences that encode an immunogen. In such methods, the nucleic acid sequences that encode the LS-3 epitope may used as immunotherapeutics alone or in combination with other immunomodulatory proteins such as those described above in the section entitled combination treatments.

### A. Nucleic Acid Compositions

[0225] Disclosed are compositions comprising one or plurality of expressible nucleic acid sequences. In some embodiments, the expressible nucleic acid sequence is a DNA. In other embodiments, the expressible nucleic acid sequence is a RNA. In some embodiments, the expressible nucleic acid is operably linked to one or a plurality of regulatory sequences. In some embodiments, the expressible nucleic acid sequence is comprised and forms a part of a nucleic acid molecule, such as a vector or plasmid.

[0226] In one aspect, the expressible nucleic acid sequence of the disclosure comprises a first nucleic acid sequence encoding a scaffold domain comprising a self-assembling polypeptide or a pharmaceutically acceptable salt thereof, and a second nucleic acid sequence encoding an antigen domain comprising a viral antigen or a pharmaceutically acceptable salt thereof. The self-assembling polypeptide is a self-assembling peptide that is expressed to envelope the viral antigen. Transformed or transfected cells exposed to such expressible nucleic acid sequences can produce the self-assembling peptide which envelopes the viral antigens, thereby stimulating the viral antigen-specific immune response against the antigen. In some embodiments, the antigen-specific immune response is a therapeutically effective immune response against the virus from which the antigen amino acid sequence is obtained. In some embodiments, the viral antigen encoded by the expressible nucleic acid of the disclosure comprises a coronaviral antigen. In some embodiments, the expressible nucleic acid sequence further comprises a third nucleic acid sequence encoding a leader sequence or a pharmaceutically acceptable salt thereof. In some embodiments, the leader sequence is an IgE or IgG leader sequence. In some embodiments, the expressible nucleic acid sequence further comprises a fourth nucleic acid sequence encoding a linker peptide or a pharmaceutically acceptable salt thereof, wherein the fourth nucleic acid sequence is positioned between the first nucleic acid sequence and the second nucleic acid sequence in the 5′ to 3′ orientation. In some embodiments, the expressible nucleic acid sequence comprises a first nucleic acid sequence encoding a scaffold domain comprising a self-assembling polypeptide or a pharmaceutically acceptable salt thereof, a second nucleic acid sequence encoding an antigen domain comprising a viral antigen or a pharmaceutically acceptable salt thereof, and a third nucleic acid sequence encoding a leader sequence or a pharmaceutically acceptable salt thereof. In some embodiments, the expressible nucleic acid sequence comprises a first nucleic acid sequence encoding a scaffold domain comprising a self-assembling polypeptide or a pharmaceutically acceptable salt thereof, a second nucleic acid sequence encoding an antigen domain comprising a viral antigen or a pharmaceutically acceptable salt thereof, a third nucleic acid sequence encoding a leader sequence or a pharmaceutically acceptable salt thereof, and a fourth nucleic acid sequence encoding a linker peptide or a pharmaceutically acceptable salt thereof, wherein the fourth nucleic acid sequence is positioned between the first nucleic acid sequence and the second nucleic acid sequence in the 5′ to 3′ orientation.

[0227] In some embodiments, the expressible nucleic acid sequence of the disclosure comprises a nucleic acid sequence encoding a viral trimer polypeptide, a functional fragment thereof or a pharmaceutically acceptable salt thereof. In some embodiments, the expressible nucleic acid sequence comprises, in a 5′ to 3′ orientation, a first nucleic acid sequence encoding a leader sequence or a pharmaceutically acceptable salt thereof, and a second nucleic acid sequence encoding a viral trimer polypeptide, a functional fragment or variant thereof or a pharmaceutically acceptable salt thereof. In some embodiments, the leader sequence is an IgE or IgG leader sequence. In some embodiments, the expressible nucleic acid sequence comprises, in a 5′ to 3′ orientation, a first nucleic acid sequence encoding a leader sequence or a pharmaceutically acceptable salt thereof, and a second nucleic acid sequence encoding a viral polypeptide that is a component of a viral trimer, a functional fragment or variant thereof or a pharmaceutically acceptable salt thereof. In some embodiments, the viral polypeptide that is a component of a viral trimer is a monomer of a viral trimer, such that, upon expression, the monomers spontaneously aggregate to form a trimeric viral polypeptide. In some embodiments, the viral trimer encoded by the expressible nucleic acid of the disclosure comprises a coronaviral trimer. In some embodiments, the viral trimer comprises the spike protein of SARS-CoV-2, a functional fragment or variant thereof or a pharmaceutically acceptable salt thereof.

[0228] In some embodiments, the nucleic acid sequences encoding the viral antigens or viral trimers comprised in the expressible nucleic acid of the disclosure comprise one or a plurality of mutations so to tailor the vaccine induced responses. Such mutations result in creating glycan sites in the encoded polypeptide so that glycosylation events can be obtained. In some embodiments, such glycan modifications or mutations decrease the bottom reactivity. In some embodiments, such glycan modifications or mutations increase antigen activity.

[0229] 1. Leader Sequence

[0230] The expressible nucleic acid sequence of the present disclosure optionally comprises a nucleic acid sequence encoding a leader sequence, a functional fragment or variant thereof or a pharmaceutically acceptable salt thereof. A “leader sequence” may from time to time refer to a “signal peptide” and thus, the terms “leader sequence” and “signal peptide” are used interchangeably herein and refer to an amino acid sequence that can be linked at the amino terminus of a protein set forth herein. Signal peptides/leader sequences typically direct localization of a protein. Signal peptides/leader sequences used herein preferably facilitate secretion of the protein from the cell in which it is produced. Signal peptides/leader sequences are often cleaved from the remainder of the protein, often referred to as the mature protein, upon secretion from the cell. Signal peptides/leader sequences, when present, are linked at the N terminus of the protein. The presence of a leader sequence may be required for proper secretion of the viral antigen or trimer encoded by the expressible nucleic acid sequence of the disclosure.

[0231] A non-limiting example of the leader sequence is the IgE leader sequence comprising the amino acid sequence of MDWTWILFLVAAATRVHS (SEQ ID NO: 1; also named “MD39”) encoded by one of the following nucleic acid sequences:

(SEQ ID NO: 2; “MD39”)
atggactggacatggattctgttcctggtcgctgccgctacaagagtgcat
tcc;
(SEQ ID NO: 3; “CPG9.2”)
atggattggacttggattctgttcctggtcgcagcagccacacgagtgcat
agc;
and
(SEQ ID NO: 4)
atggactggacctggattctgttcctggtggccgccgccacaagggtgcac
agc

[0232] Another non-limiting example of the leader sequence is the amino acid sequence of MDWTWRILFLVAAATGTHA (SEQ ID NO: 5) encoded by the nucleic acid sequence of atggactggacctggagaatcctgttcctggtggccgccgccaccggcacacacgccgatacacacttccccatctgcatcttttgctg tggctgttgccataggtccaagtgtgggatgtgctgcaaaact (SEQ ID NO: 6).

[0233] Thus, in some embodiments when the leader sequence is present, the leader sequence may comprise at least about 60%, 65%, 70%, 75%, 80%, 85%, 90%, 95%, or 99% sequence identity to SEQ ID NO: 1 or SEQ ID NO: 5, or a functional fragment or variant thereof. In some embodiments when the leader sequence is present, the leader sequence may comprise the amino acid sequence of SEQ ID NO: 1 or SEQ ID NO: 5, or a functional fragment or variant thereof. In some embodiments when the leader sequence is present, the leader sequence may be encoded by a nucleic acid sequence comprising at least about 60%, 65%, 70%, 75%, 80%, 85%, 90%, 95%, or 99% sequence identity to SEQ ID NO: 2, SEQ ID NO: 3, SEQ ID NO: 4 or SEQ ID NO: 6, or a functional fragment or variant thereof. In some embodiments when the leader sequence is present, the leader sequence may be encoded by the nucleic acid sequence of SEQ ID NO: 2, SEQ ID NO: 3, SEQ ID NO: 4 or SEQ ID NO: 6, or a functional fragment or variant thereof.

[0234] 2. Self-Assembling Polypeptide

[0235] The disclosure relates to an expressible nucleic acid sequence comprising at least one nucleic acid sequence encoding a scaffold domain comprising a self-assembling polypeptide, a functional fragment or variant thereof or a pharmaceutically acceptable salt thereof. Self-assembling polypeptide are polypeptides capable of undergoing spontaneous assembling into ordered nanostructures. Effectively self-assembling polypeptides can act as building blocks to form the scaffold domain of the present disclosure. In some embodiments, the self-assembling polypeptides encoded by the expressible nucleic acid sequence of the disclosure are monomeric forms of viral trimers or variants thereof. In some embodiments, the self-assembling polypeptides are monomers of nanoparticle structural proteins that self-assemble into nanoparticles upon expression.

[0236] The self-assembling peptide is a scaffold of the lumazine synthase of hyperthermophilic bacterium Aquifex aeolicus having the amino acid sequence of SEQ ID NO: 8 (LS-3 scaffold) encoded by the nucleic acid sequence of SEQ ID NO: 7.

(SEQ ID NO: 7)
atgcagatctacgaaggaaaactgaccgctgagggactgaggttcggaatt
gtcgcaagccgcgcgaatcacgcactggtggataggctggtggaaggcgct
atcgacgcaattgtccggcacggcgggagagaggaagacatcacactggtg
agagtctgcggcagctgggagattcccgtggcagctggagaactggctcga
aaggaggacatcgatgccgtgatcgctattggggtcctgtgccgaggagca
actcccagcttcgactacatcgcctcagaagtgagcaaggggctggctgat
ctgtccctggagctgaggaaacctatcacttttggcgtgattactgccgac
accctggaacaggcaatcgaggcggccggcacctgccatggaaacaaaggc
tgggaagcagccctgtgcgctattgagatggcaaatctgttcaaatctctg
cga
(SEQ ID NO: 8)
MQIYEGKLTAEGLRFGIVASRANHALVDRLVEGAIDAIVRHGGREEDITLV
RVCGSWEIPVAAGELARKEDIDAVIAIGVLCRGATPSFDYIASEVSKGLAD
LSLELRKPITFGVITADTLEQAIEAAGTCHGNKGWEAALCAIEMANLFKSL
R

[0237] 3. Linker

[0238] The expressible nucleic acid sequence of the present disclosure optionally comprises a nucleic acid sequence encoding a linker peptide, a functional fragment or variant thereof or a pharmaceutically acceptable salt thereof. Any type of linker or linker peptide can be used. The term “linker” or “linker peptide” is used interchangeable herein.

[0239] In some embodiments, each linker or linker peptide is independently selectable from about 0 to about 25, about 1 to about 25, about 2 to about 25, about 3 to about 25, about 4 to about 25, about 5 to about 25, about 6 to about 25, about 7 to about 25, about 8 to about 25, about 9 to about 25, about 10 to about 25, about 11 to about 25, about 12 to about 25, about 13 to about 25, about 14 to about 25, about 15 to about 25, about 16 to about 25, about 17 to about 25, about 18 to about 25, about 19 to about 25, about 20 to about 25, about 21 to about 25, about 22 to about 25, about 23 to about 25, about 24 to about 25 natural or non-natural amino acids in length.

[0240] In some embodiments, each linker or linker peptide is about 0, about 1, about 2, about 3, about 4, about 5, about 6, about 7, about 8, about 9, about 10, about 11, about 12, about 13, about 14, about 15, about 16, about 17, about 18, about 19, about 20, about 21, about 22, about 23, about 24, about 25 natural or non-natural amino acids in length. In some embodiments, each linker or linker peptide is independently selectable from a linker or linker peptide that is about 0, about 1, about 2, about 3, about 4, about 5, about 6, about 7, about 8, about 9, about 10, about 11, about 12, about 13, about 14, about 15, about 16, about 17, about 18, about 19, about 20, about 21, about 22, about 23, about 24, about 25 natural or non-natural amino acids in length. In some embodiments, each linker or linker peptide is about 21 natural or non-natural amino acids in length.

[0241] In some embodiments, the length of each linker or linker peptide is different. For example, in some embodiments, the length of a first linker or linker peptide is about 0, about 1, about 2, about 3, about 4, about 5, about 6, about 7, about 8, about 9, about 10, about 11, about 12, about 13, about 14, about 15, about 16, about 17, about 18, about 19, about 20, about 21, about 22, about 23, about 24, about 25 natural or non-natural amino acids in length, and the length of a second linker is about 0, about 1, about 2, about 3, about 4, about 5, about 6, about 7, about 8, about 9, about 10, about 11, about 12, about 13, about 14, about 15, about 16, about 17, about 18, about 19, about 20, about 21, about 22, about 23, about 24, about 25 natural or non-natural amino acids in length, where the length of the first linker is different from the length of the second linker. Various configurations can be envisioned by the present disclosure, where the linker domain comprises 1, 2, 3, 4, 5, 6, 7, 8, 9, 10 or more linkers or linker peptides wherein the linkers or linker peptides are of similar or different lengths. In some embodiments, two linkers or linker peptides can be used together. Accordingly, in some embodiments, the first linker or linker peptide is independently selectable from about 0 to about 25 natural or non-natural amino acids in length, about 0 to about 25, about 1 to about 25, about 2 to about 25, about 3 to about 25, about 4 to about 25, about 5 to about 25, about 6 to about 25, about 7 to about 25, about 8 to about 25, about 9 to about 25, about 10 to about 25, about 11 to about 25, about 12 to about 25, about 13 to about 25, about 14 to about 25, about 15 to about 25, about 16 to about 25, about 17 to about 25, about 18 to about 25, about 19 to about 25, about 20 to about 25, about 21 to about 25, about 22 to about 25, about 23 to about 25, about 24 to about 25 natural or non-natural amino acids in length. In some embodiments, the second linker or linker peptide is independently selectable from about 0 to about 25, about 1 to about 25, about 2 to about 25, about 3 to about 25, about 4 to about 25, about 5 to about 25, about 6 to about 25, about 7 to about 25, about 8 to about 25, about 9 to about 25, about 10 to about 25, about 11 to about 25, about 12 to about 25, about 13 to about 25, about 14 to about 25, about 15 to about 25, about 16 to about 25, about 17 to about 25, about 18 to about 25, about 19 to about 25, about 20 to about 25, about 21 to about 25, about 22 to about 25, about 23 to about 25, about 24 to about 25 natural or non-natural amino acids in length. In some embodiments, the first linker or linker peptide is independently selectable from a linker or linker peptide that is about 0, about 1, about 2, about 3, about 4, about 5, about 6, about 7, about 8, about 9, about 10, about 11, about 12, about 13, about 14, about 15, about 16, about 17, about 18, about 19, about 20, about 21, about 22, about 23, about 24, about 25 natural or non-natural amino acids in length. In some embodiments, the second linker or linker peptide is independently selectable from a linker or linker peptide that is about 0, about 1, about 2, about 3, about 4, about 5, about 6, about 7, about 8, about 9, about 10, about 11, about 12, about 13, about 14, about 15, about 16, about 17, about 18, about 19, about 20, about 21, about 22, about 23, about 24, about 25 natural or non-natural amino acids in length.

[0242] A non-limiting example of a linker peptide may comprise the amino acid sequence of GGSGGSGGSGGSGGG (SEQ ID NO: 22) encoded by the nucleic acid sequence of ggaggctccggaggatctggagggagtggaggctcaggaggaggc (SEQ ID NO: 21).

[0243] A linker or linker peptide can be either flexible or rigid or a combination thereof. An example of a flexible linker is a GGS repeat. In some embodiments, the GGS can be repeated about 1, 2, 3, 4, 5, 6, 7, 8, 9, or 10 times. Non-limiting examples of such linker peptides may comprise the amino acid sequence of GGSGGSGGS (SEQ ID NO: 23), GGSGGSGGSGGS (SEQ ID NO: 24), or GGSGGSGGSGGSGGGGSGGGSGGG (SEQ ID NO: 25). An example of a rigid linker is 4QTL-115 Angstroms, single chain 3-helix bundle represented by the sequence:

(SEQ ID NO: 26)
NEDDMKKLYKQMVQELEKARDRMEKLYKEMVELIQKAIELMRKIFQEVKQE
VEKAIEEMKKLYDEAKKKIEQMIQQIKQGGDKQKMEELLKRAKEEMKKVKD
KMEKLLEKLKQIMQEAKQKMEKLLKQLKEEMKKMKEKMEKLLKEMKQRMEE
VKKKMDGDDELLEKIKKNIDDLKKIAEDLIKKAEENIKEAKKIAEQLVKRA
KQLIEKAKQVAEELIKKILQLIEKAKEIAEKVLKGLE

[0244] Other non-limiting examples of linker peptides may be encoded by the nucleic acid sequence of

(SEQ ID NO: 27)
ggcggctctggcggaagtggcggaagtgggggaagtggaggcggcggaagc
gggggaggcagcgggggaggg,
(SEQ ID NO: 28)
ggcggaagcggcggaagcggcgggtct,
(SEQ ID NO: 29)
ggcggcagcggcggcagcggcgggagcggaggaagt,
or
(SEQ ID NO: 30)
ggcggctctggcggaagtggcggaagtgggggaagtggaggcggcggaagc
gggggaggcagcgggggaggg.

[0245] Additional non-limiting examples of linker peptides include Link 14 linker (SEQ ID NO: 32) encoded by the nucleic acid sequence of SEQ ID NO: 31;

(SEQ ID NO: 31)
tctcacagcggctccggcggctctggcagcggcggccacgcc
(SEQ ID NO: 32)
SHSGSGGSGSGGHA

CPG9.2 linker 1 (SEQ ID NO: 34) encoded by the nucleic acid sequence of SEQ ID NO: 33;

(SEQ ID NO: 33)
gggggaaatagtagcggc
(SEQ ID NO: 34)
GGNSSG

CPG9.2 linker 2 (SEQ ID NO: 36) encoded by the nucleic acid sequence of SEQ ID NO: 35;

(SEQ ID NO: 35)
ggcggcaacggcagcggcggcggcagcggctccggcggcaacggctctagc
ggc
(SEQ ID NO: 36)
GGNGSGGGSGSGGNGSSG

PDGFR linker (between trimer or TS1 and PDGFR; SEQ ID NO: 38) encoded by the nucleic acid sequence of SEQ ID NO: 37;

(SEQ ID NO: 37)
ggaggaggaagcgggggaagcgggggaagcggaggaagcgggggaagcggg
ggaagc
(SEQ ID NO: 38)
GGGSGGSGGSGGSGGSGGS

Foldon PDGFR linker 1 (SEQ ID NO: 40) encoded by the nucleic acid sequence of SEQ ID NO: 39;

(SEQ ID NO: 39)
ggaggaggaagcgggggaagcggcggcggc
(SEQ ID NO: 40)
GGGSGGSGGG

Foldon PDGFR linker 2 (SEQ ID NO: 42) encoded by the nucleic acid sequence of SEQ ID NO: 41;

(SEQ ID NO: 41)
gggggaagcggaggaagcgggggaagcgggggaagc
(SEQ ID NO: 42)
GGSGGSGGSGGS

3BVE linker (SEQ ID NO: 44) encoded by the nucleic acid sequence of SEQ ID NO: 43;

(SEQ ID NO: 43)
ggaagcggc
(SEQ ID NO: 44)
GSG

I3_1 linker (SEQ ID NO: 46) encoded by the nucleic acid sequence of SEQ ID NO: 45;

(SEQ ID NO: 45)
ggcggcagcggcagcggcgggagcggagga
(SEQ ID NO: 46)
GGSGSGGSGG

I3_2 linker (SEQ ID NO: 48) encoded by the nucleic acid sequence of SEQ ID NO: 47;

(SEQ ID NO: 47)
ggagggagcgatatgagaaaggacgccgagagacggtttgataagttcgt
ggaggctgctaagaataagtttgacaagtttaaggctgccctgcggaagg
gcgacatcaaggaggagaggagaaaggatatgaagaagctggcaaggaag
gaggcagagcaggcaaggagggccgtgaggaacagactgagcgagctgct
gtccaagatcaacgacatgcccatcaccaatgatcagaagaagctgatgt
ctaatgacgtgctgaagttcgccgcagaagccgaaaagaagattgaagcc
ctggcagcagacgccgaaggaggaagcgggagc
(SEQ ID NO: 48)
GGSDMRKDAERRFDKFVEAAKNKFDKFKAALRKGDIKEERRKDMKKLARK
EAEQARRAVRN-RLSELLSKINDMPITNDQKKLMSNDVLKFAAEAEKKIE
ALAADAEGGSGS

LS_1 linker (SEQ ID NO: 50) encoded by the nucleic acid sequence of SEQ ID NO: 49;

(SEQ ID NO: 49)
gggggctctagcgggaaaagtctggtggataccgtctatgctctgaaaga
tgaggtgcaggaactgaggcaggacaacaaaaagatgaagaagagcctgg
aggaggagcagagggccagaaaggacctggaaaaactggtgcggaaagtg
ctgaaaaacatgaatgacggagggagtagcggg
(SEQ ID NO: 50)
GGSSGKSLVDTVYALKDEVQELRQDNKKMKKSLEEEQRARKDLEKLVRKV
LKNMNDGGSSG

LS_2 linker (SEQ ID NO: 52) encoded by the nucleic acid sequence of SEQ ID NO: 51;

(SEQ ID NO: 51)
gggggctctagcggggcagacccaaagaaagtgctggataaggcaaagga
tcaggcagagaatagagtgagagaactgaaacagaaactggaggaactgt
ataaggaggcccggaagctggacctgacccaggagatgaggagaaagctg
gagctgcgctacatcgccgccatgctgatggccatcggcgacatctataa
cgccatcaggcaggccaagcaggaggccgataagctgaagaaggccggcc
tggtgaatagccagcagctggacgagctgaagcggcgcctggaggagctg
aaggaggaggcctccaggaaggccagagattatgggcgggaatttcagct
gaaactggagtatggcggcggaagcggaagcgggagcggg
(SEQ ID NO: 52)
GGSSGADPKKVLDKAKDQAENRVRELKQKLEELYKEARKLDLTQEMRRKL
ELRYIAAMLMAIGDIYNAIRQAKQEADKLKKAGLVNSQQLDELKRRLEEL
KEEASRKARDYGREFQLKLEYGGGSGSGSG

QB_1 linker (SEQ ID NO: 54) encoded by the nucleic acid sequence of SEQ ID NO: 53;

(SEQ ID NO: 53)
ggaggctcttcaggcggcacagacgtgggggcaatcgctggaaaggctaa
cgaggctggacagggggcttatgatgctcaggtcaaaaacgacgagcagg
atgtggagctggccgaccacgaggccaggatcaagcagctgagaatcgat
gtggacgatcacgagtctcggatcaccgccaacacaaaggccatcacagc
cctgaatgtgcgcgtgaccacagcagagggagagatcgcatccctgcaga
ccaacgtgagcgccctggacggaagggtgaccacagcagagaacaatatc
tccgccctgcaggcagattacgtgagcggcggcagctccggctccgga
(SEQ ID NO: 54)
GGSSGGTDVGAIAGKANEAGQGAYDAQVKNDEQDVELADHEARIKQLRID
VDDHESRITANTKAITALNVRVTTAEGEIASLQTNVSALDGRVTTAENNI
SALQADYVSGGSSGSG

QB_2 linker (SEQ ID NO: 56) encoded by the nucleic acid sequence of SEQ ID NO: 55; and

(SEQ ID NO: 55)
ggaggctctggaagcgggggaagtagcggacctcacatgattgctccagg
acatcgggacgagtttgaccctaagctgccaacaggcgagaaagaagagg
tgccaggcaagcccggcatcaagaaccctgagacaggcgacgtggtgagg
ccccctgtggattctgtgacaaagtacggcccagtgaagggcgacagcat
cgtggagaaggaggagatccccttcgagaaggagaggaagtttaaccctg
atctggccccaggcaccgagaaggtgacaagagagggccagaagggcgag
aagaccatcaccacacccacactgaagaatcctctgaccggcgagatcat
cagcaagggcgagtccaaggaggagatcacaaaggaccccatcaacgaac
tgaccgaatggggaccagagacaggaggaagcggcagcggcggaagcagc
(SEQ ID NO: 56)
GGSGSGGSSGPHMIAPGHRDEFDPKLPTGEKEEVPGKPGIKNPETGDVVR
PPVDSVTKYGPVKGDSIVEKEEIPFEKERKFNPDLAPGTEKVTREGQKGE
KTITTPTLKNPLTGEIISKGESKEEITKDPINELTEWGPETGGSGSGGSS

IC1/IC2 linker (SEQ ID NO: 58) encoded by the nucleic acid sequence of SEQ ID NO: 57.

(SEQ ID NO: 57)
ggaggcagcggcagcggcagcggg
(SEQ ID NO: 58)
GGSGSGSG

[0246] Accordingly, in some embodiments, the linker peptide encoded by the expressible nucleic acid sequence of the present disclosure comprises at least about 60%, 65%, 70%, 75%, 80%, 85%, 90%, 95%, or 99% sequence identity to SEQ ID NO: 22, SEQ ID NO: 23, SEQ ID NO: 24, SEQ ID NO: 25, SEQ ID NO: 26, SEQ ID NO: 32, SEQ ID NO: 34, SEQ ID NO: 36, SEQ ID NO: 38, SEQ ID NO: 40, SEQ ID NO: 42, SEQ ID NO: 44, SEQ ID NO: 46, SEQ ID NO: 48, SEQ ID NO: 50, SEQ ID NO: 52, SEQ ID NO: 54, SEQ ID NO: 56 or SEQ ID NO: 58, or a functional fragment or variant thereof. In some embodiments, the linker peptide comprises the amino acid sequence of SEQ ID NO: 22, SEQ ID NO: 23, SEQ ID NO: 24, SEQ ID NO: 25, SEQ ID NO: 26, SEQ ID NO: 32, SEQ ID NO: 34, SEQ ID NO: 36, SEQ ID NO: 38, SEQ ID NO: 40, SEQ ID NO: 42, SEQ ID NO: 44, SEQ ID NO: 46, SEQ ID NO: 48, SEQ ID NO: 50, SEQ ID NO: 52, SEQ ID NO: 54, SEQ ID NO: 56 or SEQ ID NO: 58, or a functional fragment or variant thereof. In some embodiments, the nucleic acid sequence encoding the linker peptide comprises at least about 60%, 65%, 70%, 75%, 80%, 85%, 90%, 95%, or 99% sequence identity to SEQ ID NO: 21, SEQ ID NO: 27, SEQ ID NO: 28, SEQ ID NO: 29, SEQ ID NO: 30, SEQ ID NO: 31, SEQ ID NO: 33, SEQ ID NO: 35, SEQ ID NO: 37, SEQ ID NO: 39, SEQ ID NO: 41, SEQ ID NO: 43, SEQ ID NO: 45, SEQ ID NO: 47, SEQ ID NO: 49, SEQ ID NO: 51, SEQ ID NO: 53, SEQ ID NO: 55 or SEQ ID NO: 57 or a functional fragment or variant thereof. In some embodiments, the nucleic acid sequence encoding the linker peptide comprises the nucleotide sequence of SEQ ID NO: 21, SEQ ID NO: 27, SEQ ID NO: 28, SEQ ID NO: 29, SEQ ID NO: 30, SEQ ID NO: 31, SEQ ID NO: 33, SEQ ID NO: 35, SEQ ID NO: 37, SEQ ID NO: 39, SEQ ID NO: 41, SEQ ID NO: 43, SEQ ID NO: 45, SEQ ID NO: 47, SEQ ID NO: 49, SEQ ID NO: 51, SEQ ID NO: 53, SEQ ID NO: 55 or SEQ ID NO: 57 or a functional fragment or variant thereof.

[0247] 4. Viral Antigens

[0248] The expressible nucleic acid sequence of the present disclosure comprises a nucleic acid sequence encoding an antigen domain comprising a viral antigen, a functional fragment or variant thereof or a pharmaceutically acceptable salt thereof. In some embodiments, the viral antigen comprises an antigen from a virus from the family of Coronaviridae. In some embodiments, the viral antigen comprises an antigen from a coronavirus. In some embodiments, the viral antigen comprises an antigen from SARS-CoV. In some embodiments, the viral antigen comprises an antigen from SARS-CoV-2. In some embodiments, the viral antigen comprises the spike protein of SARS-CoV-2, a functional fragment or variant thereof or a pharmaceutically acceptable salt thereof. In some embodiments, the viral antigen comprises a viral trimer polypeptide, a functional fragment or variant thereof or a pharmaceutically acceptable salt thereof. In some embodiments, the viral trimer comprises a trimer from a virus from the family of Coronaviridae. In some embodiments, the viral trimer comprises a trimer from a coronavirus. In some embodiments, the viral trimer comprises a trimer from SARS-CoV. In some embodiments, the viral trimer comprises a trimer from SARS-CoV-2. In some embodiments, the viral trimer comprises the spike protein of SARS-CoV-2, a functional fragment or variant thereof or a pharmaceutically acceptable salt thereof.

[0249] A non-limiting example of a viral antigen is a fragment of the surface glycoprotein (or spike protein or S protein) of SARS-CoV-2 having the amino acid sequence of SEQ ID NO: 60 encoded by the nucleic acid sequence of SEQ ID NO: 59 (GenBank Accession No. QHD43416).

(SEQ ID NO: 59)
atgtttgtttttcttgttttattgccactagtctctagtcagtgtgttaa
tcttacaaccagaactcaattaccccctgcatacactaattctttcacac
gtggtgtttattaccctgacaaagttttcagatcctcagttttacattca
actcaggacttgttcttacctttcttttccaatgttacttggttccatgc
tatacatgtctctgggaccaatggtactaagaggtttgataaccctgtcc
taccatttaatgatggtgtttattttgcttccactgagaagtctaacata
ataagaggctggatttttggtactactttagattcgaagacccagtccct
acttattgttaataacgctactaatgttgttattaaagtctgtgaatttc
aattttgtaatgatccatttttgggtgtttattaccacaaaaacaacaaa
agttggatggaaagtgagttcagagtttattctagtgcgaataattgcac
ttttgaatatgtctctcagccttttcttatggaccttgaaggaaaacagg
gtaatttcaaaaatcttagggaatttgtgtttaagaatattgatggttat
tttaaaatatattctaagcacacgcctattaatttagtgcgtgatctccc
tcagggtttttcggctttagaaccattggtagatttgccaataggtatta
acatcactaggtttcaaactttacttgctttacatagaagttatttgact
cctggtgattcttcttcaggttggacagctggtgctgcagcttattatgt
gggttatcttcaacctaggacttttctattaaaatataatgaaaatggaa
ccattacagatgctgtagactgtgcacttgaccctctctcagaaacaaag
tgtacgttgaaatccttcactgtagaaaaaggaatctatcaaacttctaa
ctttagagtccaaccaacagaatctattgttagatttcctaatattacaa
acttgtgcccttttggtgaagtttttaacgccaccagatttgcatctgtt
tatgcttggaacaggaagagaatcagcaactgtgttgctgattattctgt
cctatataattccgcatcattttccacttttaagtgttatggagtgtctc
ctactaaattaaatgatctctgctttactaatgtctatgcagattcattt
gtaattagaggtgatgaagtcagacaaatcgctccagggcaaactggaaa
gattgctgattataattataaattaccagatgattttacaggctgcgtta
tagcttggaattctaacaatcttgattctaaggttggtggtaattataat
tacctgtatagattgtttaggaagtctaatctcaaaccttttgagagaga
tatttcaactgaaatctatcaggccggtagcacaccttgtaatggtgttg
aaggttttaattgttactttcctttacaatcatatggtttccaacccact
aatggtgttggttaccaaccatacagagtagtagtactttcttttgaact
tctacatgcaccagcaactgtttgtggacctaaaaagtctactaatttgg
ttaaaaacaaatgtgtcaatttcaacttcaatggtttaacaggcacaggt
gttcttactgagtctaacaaaaagtttctgcctttccaacaatttggcag
agacattgctgacactactgatgctgtccgtgatccacagacacttgaga
ttcttgacattacaccatgttcttttggtggtgtcagtgttataacacca
ggaacaaatacttctaaccaggttgctgttctttatcaggatgttaactg
cacagaagtccctgttgctattcatgcagatcaacttactcctacttggc
gtgtttattctacaggttctaatgtttttcaaacacgtgcaggctgttta
ataggggctgaacatgtcaacaactcatatgagtgtgacatacccattgg
tgcaggtatatgcgctagttatcagactcagactaattctcctcggcggg
cacgtagtgtagctagtcaatccatcattgcctacactatgtcacttggt
gcagaaaattcagttgcttactctaataactctattgccatacccacaaa
ttttactattagtgttaccacagaaattctaccagtgtctatgaccaaga
catcagtagattgtacaatgtacatttgtggtgattcaactgaatgcagc
aatcttttgttgcaatatggcagtttttgtacacaattaaaccgtgcttt
aactggaatagctgttgaacaagacaaaaacacccaagaagtttttgcac
aagtcaaacaaatttacaaaacaccaccaattaaagattttggtggtttt
aatttttcacaaatattaccagatccatcaaaaccaagcaagaggtcatt
tattgaagatctacttttcaacaaagtgacacttgcagatgctggcttca
tcaaacaatatggtgattgccttggtgatattgctgctagagacctcatt
tgtgcacaaaagtttaacggccttactgttttgccacctttgctcacaga
tgaaatgattgctcaatacacttctgcactgttagcgggtacaatcactt
ctggttggacctttggtgcaggtgctgcattacaaataccatttgctatg
caaatggcttataggtttaatggtattggagttacacagaatgttctcta
tgagaaccaaaaattgattgccaaccaatttaatagtgctattggcaaaa
ttcaagactcactttcttccacagcaagtgcacttggaaaacttcaagat
gtggtcaaccaaaatgcacaagctttaaacacgcttgttaaacaacttag
ctccaattttggtgcaatttcaagtgttttaaatgatatcctttcacgtc
ttgacaaagttgaggctgaagtgcaaattgataggttgatcacaggcaga
cttcaaagtttgcagacatatgtgactcaacaattaattagagctgcaga
aatcagagcttctgctaatcttgctgctactaaaatgtcagagtgtgtac
ttggacaatcaaaaagagttgatttttgtggaaagggctatcatcttatg
tccttccctcagtcagcacctcatggtgtagtcttcttgcatgtgactta
tgtccctgcacaagaaaagaacttcacaactgctcctgccatttgtcatg
atggaaaagcacactttcctcgtgaaggtgtctttgtttcaaatggcaca
cactggtttgtaacacaaaggaatttttatgaaccacaaatcattactac
agacaacacatttgtgtctggtaactgtgatgttgtaataggaattgtca
acaacacagtttatgatcctttgcaacctgaattagactcattcaaggag
gagttagataaatattttaagaatcatacatcaccagatgttgatttagg
tgacatctctggcattaatgcttcagttgtaaacattcaaaaagaaattg
accgcctcaatgaggttgccaagaatttaaatgaatctctcatcgatctc
caagaacttggaaagtatgagcagtatataaaatggccatggtacatttg
gctaggttttatagctggcttgattgccatagtaatggtgacaattatgc
tttgctgtatgaccagttgctgtagttgtctcaagggctgttgttcttgt
ggatcctgctgcaaatttgatgaagacgactctgagccagtgctcaaagg
agtcaaattacattacacataa
(SEQ ID NO: 60)
MFVFLVLLPLVSSQCVNLTTRTQLPPAYTNSFTRGVYYPDKVFRSSVLHS
TQDLFLPFFSNVTWFHAIHVSGTNGTKRFDNPVLPFNDGVYFASTEKSNI
IRGWIFGTTLDSKTQSLLIVNNATNVVIKVCEFQFCNDPFLGVYYHKNNK
SWMESEFRVYSSANNCTFEYVSQPFLMDLEGKQGNFKNLREFVFKNIDGY
FKIYSKHTPINLVRDLPQGFSALEPLVDLPIGINITRFQTLLALHRSYLT
PGDSSSGWTAGAAAYYVGYLQPRTFLLKYNENGTITDAVDCALDPLSETK
CTLKSFTVEKGIYQTSNFRVQPTESIVRFPNITNLCPFGEVFNATRFASV
YAWNRKRISNCVADYSVLYNSASFSTFKCYGVSPTKLNDLCFTNVYADSF
VIRGDEVRQIAPGQTGKIADYNYKLPDDFTGCVIAWNSNNLDSKVGGNYN
YLYRLFRKSNLKPFERDISTEIYQAGSTPCNGVEGFNCYFPLQSYGFQPT
NGVGYQPYRVVVLSFELLHAPATVCGPKKSTNLVKNKCVNFNFNGLTGTG
VLTESNKKFLPFQQFGRDIADTTDAVRDPQTLEILDITPCSFGGVSVITP
GTNTSNQVAVLYQDVNCTEVPVAIHADQLTPTWRVYSTGSNVFQTRAGCL
IGAEHVNNSYECDIPIGAGICASYQTQTNSPRRARSVASQSIIAYTMSLG
AENSVAYSNNSIAIPTNFTISVTTEILPVSMTKTSVDCTMYICGDSTECS
NLLLQYGSFCTQLNRALTGIAVEQDKNTQEVFAQVKQIYKTPPIKDFGGF
NFSQILPDPSKPSKRSFIEDLLFNKVTLADAGFIKQYGDCLGDIAARDLI
CAQKFNGLTVLPPLLTDEMIAQYTSALLAGTITSGWTFGAGAALQIPFAM
QMAYRENGIGVTQNVLYENQKLIANQFNSAIGKIQDSLSSTASALGKLQD
VVNQNAQALNTLVKQLSSNFGAISSVLNDILSRLDKVEAEVQIDRLITGR
LQSLQTYVTQQLIRAAEIRASANLAATKMSECVLGQSKRVDFCGKGYHLM
SFPQSAPHGVVFLHVTYVPAQEKNFTTAPAICHDGKAHFPREGVFVSNGT
HWFVTQRNFYEPQIITTDNTFVSGNCDVVIGIVNNTVYDPLQPELDSFKE
ELDKYFKNHTSPDVDLGDISGINASVVNIQKEIDRLNEVAKNLNESLIDL
QELGKYEQYIKWPWYIWLGFIAGLIAIVMVTIMLCCMTSCCSCLKGCCSC
GSCCKFDEDDSEPVLKGVKLHYT

[0250] Non-limiting examples of fragments of the S protein of SARS-CoV-2 comprises the following sequences:

(SEQ ID NO: 171)
MFVFLVLLPLVSSQCVNLTTRTQLPPAYTNSFTRGVYYPDKVFRSSVLHSTQDLFLPF
FSNVTWFHAIHVSGTNGTKRFDNPVLPFNDGVYFASTEKSNIIRGWIFGTTLDSKTQS
LLIVNNATNVVIKVCEFQFCNDPFLGVYYHKNNKSWMESEFRVYSSANNCTFEYVS
QPFLMDLEGKQGNFKNLREFVFKNIDGYFKIYSKHTPINLVRDLPQGFSALEPLVDLPI
GINITRFQTLLALHRSYLTPGDSSSGWTAGAAAYYVGYLQPRTFLLKYNENGTITDA
VDCALDPLSETKCTLKSFTVEKGIYQTSNFRVQPTESIVRFPNITNLCPFGEVFNATRF
ASVYAWNRKRISNCVADYSVLYNSASFSTFKCYGVSPTKLNDLCFTNVYADSFVIRG
DEVRQIAPGQTGKIADYNYKLPDDFTGCVIAWNSNNLDSKVGGNYNYLYRLFRKSN
LKPFERDISTEIYQAGSTPCNGVEGFNCYFPLQSYGFQPTNGVGYQPYRVVVLSFELL
HAPATVCGPKKSTNLVKNKCVNFNFNGLTGTGVLTESNKKFLPFQQFGRDIADTTDA
VRDPQTLEILDITPCSFGGVSVITPGTNTSNQVAVLYQDVNCTEVPVAIHADQLTPTW
RVYSTGSNVFQTRAGCLIGAEHVNNSYECDIPIGAGICASYQTQTNSPRRARSVASQSI
IAYTMSLGAENSVAYSNNSIAIPTNFTISVTTEILPVSMTKTSVDCTMYICGDSTECSN
LLLQYGSFCTQLNRALTGIAVEQDKNTQEVFAQVKQIYKTPPIKDFGGFNFSQILPDPS
KPSKRSFIEDLLFNKVTLADAGFIKQYGDCLGDIAARDLICAQKFNGLTVLPPLLTDE
MIAQYTSALLAGTITSGWTFGAGAALQIPFAMQMAYRFNGIGVTQNVLYENQKLIA
NQFNSAIGKIQDSLSSTASALGKLQDVVNQNAQALNTLVKQLSSNFGAISSVLNDILS
RLDKVEAEVQIDRLITGRLQSLQTYVTQQLIRAAEIRASANLAATKMSECVLGQSKR
VDFCGKGYHLMSFPQSAPHGVVFLHVTYVPAQEKNFTTAPAICHDGKAHFPREGVF
KYFKNHTSPDVDLGDISGINASVVNIQKEIDRLNEVAKNLNESLIDLQELGKYEQYIK
WPW
(SEQ ID NO: 172)
MFVFLVLLPLVSSQCVNLTTRTQLPPAYTNSFTRGVYYPDKVFRSSVLHSTQDLFLPF
FSNVTWFHAIHVSGTNGTKRFDNPVLPFNDGVYFASTEKSNIIRGWIFGTTLDSKTQS
LLIVNNATNVVIKVCEFQFCNDPFLGVYYHKNNKSWMESEFRVYSSANNCTFEYVS
QPFLMDLEGKQGNFKNLREFVFKNIDGYFKIYSKHTPINLVRDLPQGFSALEPLVDLPI
GINITRFQTLLALHRSYLTPGDSSSGWTAGAAAYYVGYLQPRTFLLKYNENGTITDA
VDCALDPLSETKCTLKSFTVEKGIYQTSNFRVQPTESIVRFPNITNLCPFGEVFNATRF
ASVYAWNRKRISNCVADYSVLYNSASFSTFKCYGVSPTKLNDLCFTNVYADSFVIRG
DEVRQIAPGQTGKIADYNYKLPDDFTGCVIAWNSNNLDSKVGGNYNYLYRLFRKSN
LKPFERDISTEIYQAGSTPCNGVEGFNCYFPLQSYGFQPTNGVGYQPYRVVVLSFELL
HAPATVCGPKKSTNLVKNKCVNFNFNGLTGTGVLTESNKKFLPFQQFGRDIADTTDA
VRDPQTLEILDITPCSFGGVSVITPGTNTSNQVAVLYQDVNCTEVPVAIHADQLTPTW
RVYSTGSNVFQTRAGCLIGAEHVNNSYECDIPIGAGICASYQTQTNSPRRARSVASQSI
IAYTMSLGAENSVAYSNNSIAIPTNFTISVTTEILPVSMTKTSVDCTMYICGDSTECSN
LLLQYGSFCTQLNRALTGIAVEQDKNTQEVFAQVKQIYKTPPIKDFGGFNFSQILPDPS
KPSKRSFIEDLLFNKVTLADAGFIKQYGDCLGDIAARDLICAQKFNGLTVLPPLLTDE
MIAQYTSALLAGTITSGWTFGAGAALQIPFAMQMAYRFNGIGVTQNVLYENQKLIA
NQFNSAIGKIQDSLSSTASALGKLQDVVNQNAQALNTLVKQLSSNFGAISSVLNDILS
RLDKVEAEVQIDRLITGRLQSLQTYVTQQLIRAAEIRASANLAATKMSECVLGQSKR
VDFCGKGYHLMSFPQSAPHGVVFLHVTYVPAQEKNFTTAPAICHDGKAHFPREGVF
VSNGTHWFVTQRNFYEPQUITTDNTFVSGNCDVVIGIVNNTVYDPLQPELDSFKEELD
KYFKNHTSPDVDLGDISGINASVVNIQKEIDRLNEVAKNLNESLIDLQELGKYEQYIK
WP
(SEQ ID NO: 173)
MFVFLVLLPLVSSQCVNLTTRTQLPPAYTNSFTRGVYYPDKVFRSSVLHSTQDLFLPF
FSNVTWFHAIHVSGTNGTKRFDNPVLPFNDGVYFASTEKSNIIRGWIFGTTLDSKTQS
LLIVNNATNVVIKVCEFQFCNDPFLGVYYHKNNKSWMESEFRVYSSANNCTFEYVS
QPFLMDLEGKQGNFKNLREFVFKNIDGYFKIYSKHTPINLVRDLPQGFSALEPLVDLPI
GINITRFQTLLALHRSYLTPGDSSSGWTAGAAAYYVGYLQPRTFLLKYNENGTITDA
VDCALDPLSETKCTLKSFTVEKGIYQTSNFRVQPTESIVRFPNITNLCPFGEVFNATRF
ASVYAWNRKRISNCVADYSVLYNSASFSTFKCYGVSPTKLNDLCFTNVYADSFVIRG
DEVRQIAPGQTGKIADYNYKLPDDFTGCVIAWNSNNLDSKVGGNYNYLYRLFRKSN
LKPFERDISTEIYQAGSTPCNGVEGFNCYFPLQSYGFQPTNGVGYQPYRVVVLSFELL
HAPATVCGPKKSTNLVKNKCVNFNFNGLTGTGVLTESNKKFLPFQQFGRDIADTTDA
VRDPQTLEILDITPCSFGGVSVITPGTNTSNQVAVLYQDVNCTEVPVAIHADQLTPTW
RVYSTGSNVFQTRAGCLIGAEHVNNSYECDIPIGAGICASYQTQTNSPRRARSVASQSI
IAYTMSLGAENSVAYSNNSIAIPTNFTISVTTEILPVSMTKTSVDCTMYICGDSTECSN
LLLQYGSFCTQLNRALTGIAVEQDKNTQEVFAQVKQIYKTPPIKDFGGFNFSQILPDPS
KPSKRSFIEDLLFNKVTLADAGFIKQYGDCLGDIAARDLICAQKFNGLTVLPPLLTDE
MIAQYTSALLAGTITSGWTFGAGAALQIPFAMQMAYRFNGIGVTQNVLYENQKLIA
NQFNSAIGKIQDSLSSTASALGKLQDVVNQNAQALNTLVKQLSSNFGAISSVLNDILS
RLDKVEAEVQIDRLITGRLQSLQTYVTQQLIRAAEIRASANLAATKMSECVLGQSKR
VDFCGKGYHLMSFPQSAPHGVVFLHVTYVPAQEKNFTTAPAICHDGKAHFPREGVF
VSNGTHWFVTQRNFYEPQUITTDNTFVSGNCDVVIGIVNNTVYDPLQPELDSFKEELD
KYFKNHTSPDVDLGDISGINASVVNIQKEIDRLNEVAKNLNESLIDLQELGKYEQ
(SEQ ID NO: 174)
SQCVNLTTRTQLPPAYTNSFTRGVYYPDKVFRSSVLHSTQDLFLPFFSNVTWFHAIHV
SGTNGTKRFDNPVLPFNDGVYFASTEKSNIIRGWIFGTTLDSKTQSLLIVNNATNVVIK
VCEFQFCNDPFLGVYYHKNNKSWMESEFRVYSSANNCTFEYVSQPFLMDLEGKQGN
FKNLREFVFKNIDGYFKIYSKHTPINLVRDLPQGFSALEPLVDLPIGINITRFQTLLALH
RSYLTPGDSSSGWTAGAAAYYVGYLQPRTFLLKYNENGTITDAVDCALDPLSETKCT
LKSFTVEKGIYQTSNFRVQPTESIVRFPNITNLCPFGEVFNATRFASVYAWNRKRISNC
VADYSVLYNSASFSTFKCYGVSPTKLNDLCFTNVYADSFVIRGDEVRQIAPGQTGKIA
DYNYKLPDDFTGCVIAWNSNNLDSKVGGNYNYLYRLFRKSNLKPFERDISTEIYQAG
STPCNGVEGFNCYFPLQSYGFQPTNGVGYQPYRVVVLSFELLHAPATVCGPKKSTNL
VKNKCVNFNFNGLTGTGVLTESNKKFLPFQQFGRDIADTTDAVRDPQTLEILDITPCS
FGGVSVITPGTNTSNQVAVLYQDVNCTEVPVAIHADQLTPTWRVYSTGSNVFQTRA
GCLIGAEHVNNSYECDIPIGAGICASYQTQTNSPRRARSVASQSIIAYTMSLGAENSVA
YSNNSIAIPTNFTISVTTEILPVSMTKTSVDCTMYICGDSTECSNLLLQYGSFCTQLNR
ALTGIAVEQDKNTQEVFAQVKQIYKTPPIKDFGGFNFSQILPDPSKPSKRSFIEDLLFN
KVTLADAGFIKQYGDCLGDIAARDLICAQKFNGLTVLPPLLTDEMIAQYTSALLAGTI
TSGWTFGAGAALQIPFAMQMAYRFNGIGVTQNVLYENQKLIANQFNSAIGKIQDSLS
STASALGKLQDVVNQNAQALNTLVKQLSSNFGAISSVLNDILSRLDKVEAEVQIDRLI
TGRLQSLQTYVTQQLIRAAEIRASANLAATKMSECVLGQSKRVDFCGKGYHLMSFP
QSAPHGVVFLHVTYVPAQEKNFTTAPAICHDGKAHFPREGVFVSNGTHWFVTQRNF
YEPQUITTDNTFVSGNCDVVIGIVNNTVYDPLQPELDSFKEELDKYFKNHTSPDVDLG
DISGINASVVNIQKEIDRLNEVAKNLNESLIDLQELGKYEQ
(SEQ ID NO: 175)
NLCPFGEVFNATRFASVYAWNRKRISNCVADYSVLYNSASFSTFKCYGVSPTKLNDL
CFTNVYADSFVIRGDEVRQIAPGQTGKIADYNYKLPDDFTGCVIAWNSNNLDSKVGG
NYNYLYRLFRKSNLKPFERDIST
(SEQ ID NO: 176)
SFIEDLLFNKVTLADAGFIKQYGDCLGDIAARDLICAQKF
(SEQ ID NO: 177)
PSKRSFIEDLLFNKV

[0251] A further non-limiting example of a viral antigen is a fragment of the envelop protein (or E protein) of SARS-CoV-2 having the amino acid sequence of SEQ ID NO: 62 encoded by the nucleic acid sequence of SEQ ID NO: 61 (GenBank Accession No. QHD43418).

(SEQ ID NO: 61)
atgtactcattcgtttcggaagagacaggtacgttaatagttaatagcgt
acttctttttcttgctttcgtggtattcttgctagttacactagccatcc
ttactgcgcttcgattgtgtgcgtactgctgcaatattgttaacgtgagt
cttgtaaaaccttctttttacgtttactctcgtgttaaaaatctgaattc
ttctagagttcctgatcttctggtctaa
(SEQ ID NO: 62)
MYSFVSEETGTLIVNSVLLFLAFVVFLLVTLAILTALRLCAYCCNIVNVS
LVKPSFYVYSRVKNLNSSRVPDLLV

[0252] Another non-limiting example of a viral antigen is a fragment of the membrane glycoprotein (or M protein) of SARS-CoV-2 having the amino acid sequence of SEQ ID NO: 62 encoded by the nucleic acid sequence of SEQ ID NO: 61 (GenBank Accession No. QHD43419).

(SEQ ID NO: 63)
ccatggcagattccaacggtactattaccgttgaagagcttaaaaagctc
cttgaacaatggaacctagtaataggtttcctattccttacatggatttg
tcttctacaatttgcctatgccaacaggaataggtttttgtatataatta
agttaattttcctctggctgttatggccagtaactttagcttgttttgtg
cttgctgctgtttacagaataaattggatcaccggtggaattgctatcgc
aatggcttgtcttgtaggcttgatgtggctcagctacttcattgcttctt
tcagactgtttgcgcgtacgcgttccatgtggtcattcaatccagaaact
aacattcttctcaacgtgccactccatggcactattctgaccagaccgct
tctagaaagtgaactcgtaatcggagctgtgatccttcgtggacatcttc
gtattgctggacaccatctaggacgctgtgacatcaaggacctgcctaaa
gaaatcactgttgctacatcacgaacgctttcttattacaaattgggagc
ttcgcagcgtgtagcaggtgactcaggttttgctgcatacagtcgctaca
ggattggcaactataaattaaacacagaccattccagtagcagtgacaat
attgctttgcttgtacagtaa
(SEQ ID NO: 64)
MADSNGTITVEELKKLLEQWNLVIGFLFLTWICLLQFAYANRNRFLYIIK
LIFLWLLWPVTLACFVLAAVYRINWITGGIAIAMACLVGLMWLSYFIASF
RLFARTRSMWSFNPETNILLNVPLHGTILTRPLLESELVIGAVILRGHLR
IAGHHLGRCDIKDLPKEITVATSRTLSYYKLGASQRVAGDSGFAAYSRYR
IGNYKLNTDHSSSSDNIALLVQ

[0253] Yet another non-limiting example of a viral antigen is a fragment of the nucleocapsid phosphoprotein (or N protein) of SARS-CoV-2 having the amino acid sequence of SEQ ID NO: 66 encoded by the nucleic acid sequence of SEQ ID NO: 65 (GenBank Accession No. QHD43423), or a variant thereof:

(SEQ ID NO: 65)
atgtctgataatggaccccaaaatcagcgaaatgcaccccgcattacgtt
tggtggaccctcagattcaactggcagtaaccagaatggagaacgcagtg
gggcgcgatcaaaacaacgtcggccccaaggtttacccaataatactgcg
tcttggttcaccgctctcactcaacatggcaaggaagaccttaaattccc
tcgaggacaaggcgttccaattaacaccaatagcagtccagatgaccaaa
ttggctactaccgaagagctaccagacgaattcgtggtggtgacggtaaa
atgaaagatctcagtccaagatggtatttctactacctaggaactgggcc
agaagctggacttccctatggtgctaacaaagacggcatcatatgggttg
caactgagggagccttgaatacaccaaaagatcacattggcacccgcaat
cctgctaacaatgctgcaatcgtgctacaacttcctcaaggaacaacatt
gccaaaaggcttctacgcagaagggagcagaggcggcagtcaagcctctt
ctcgttcctcatcacgtagtcgcaacagttcaagaaattcaactccaggc
agcagtaggggaacttctcctgctagaatggctggcaatggcggtgatgc
tgctcttgctttgctgctgcttgacagattgaaccagcttgagagcaaaa
tgtctggtaaaggccaacaacaacaaggccaaactgtcactaagaaatct
gctgctgaggcttctaagaagcctcggcaaaaacgtactgccactaaagc
atacaatgtaacacaagctttcggcagacgtggtccagaacaaacccaag
gaaattttggggaccaggaactaatcagacaaggaactgattacaaacat
tggccgcaaattgcacaatttgcccccagcgcttcagcgttcttcggaat
gtcgcgcattggcatggaagtcacaccttcgggaacgtggttgacctaca
caggtgccatcaaattggatgacaaagatccaaatttcaaagatcaagtc
attttgctgaataagcatattgacgcatacaaaacattcccaccaacaga
gcctaaaaaggacaaaaagaagaaggctgatgaaactcaagccttaccgc
agagacagaagaaacagcaaactgtgactcttcttcctgctgcagatttg
gatgatttctccaaacaattgcaacaatccatgagcagtgctgactcaac
tcaggcctaa
(SEQ ID NO: 66)
MSDNGPQNQRNAPRITFGGPSDSTGSNQNGERSGARSKQRRPQGLPNNTA
SWFTALTQHGKEDLKFPRGQGVPINTNSSPDDQIGYYRRATRRIRGGDGK
MKDLSPRWYFYYLGTGPEAGLPYGANKDGIIWVATEGALNTPKDHIGTRN
PANNAAIVLQLPQGTTLPKGFYAEGSRGGSQASSRSSSRSRNSSRNSTPG
SSRGTSPARMAGNGGDAALALLLLDRLNQLESKMSGKGQQQQGQTVTKKS
AAEASKKPRQKRTATKAYNVTQAFGRRGPEQTQGNFGDQELIRQGTDYKH
WPQIAQFAPSASAFFGMSRIGMEVTPSGTWLTYTGAIKLDDKDPNFKDQV
ILLNKHIDAYKTFPPTEPKKDKKKKADETQALPQRQKKQQTVTLLPAADL
DDFSKQLQQSMSSADSTQA

[0254] Accordingly, in some embodiments, the viral antigen encoded by the expressible nucleic acid sequence of the present disclosure comprises at least about 60%, 65%, 70%, 75%, 80%, 85%, 90%, 95%, or 99% sequence identity to SEQ ID NO: 60, SEQ ID NO: 62, SEQ ID NO: 64, SEQ ID NO: 66, SEQ ID NO: 171, SEQ ID NO: 172, SEQ ID NO: 173, SEQ ID NO: 174, SEQ ID NO: 175, SEQ ID NO: 176 or SEQ ID NO: 177, or a functional fragment or variant thereof or a pharmaceutically acceptable salt thereof. In some embodiments, the viral antigen comprises the amino acid sequence of SEQ ID NO: 60, SEQ ID NO: 62, SEQ ID NO: 64, SEQ ID NO: 66, SEQ ID NO: 171, SEQ ID NO: 172, SEQ ID NO: 173, SEQ ID NO: 174, SEQ ID NO: 175, SEQ ID NO: 176 or SEQ ID NO: 177, or a functional fragment or variant thereof or a pharmaceutically acceptable salt thereof. In some embodiments, the nucleic acid sequence encoding the viral antigen comprises at least about 60%, 65%, 70%, 75%, 80%, 85%, 90%, 95%, or 99% sequence identity to SEQ ID NO: 59, SEQ ID NO: 61, SEQ ID NO: 63 or SEQ ID NO: 65, or a functional fragment or variant thereof or a pharmaceutically acceptable salt thereof. In some embodiments, the nucleic acid sequence encoding the viral antigen comprises the nucleotide sequence of SEQ ID NO: 59, SEQ ID NO: 61, SEQ ID NO: 63 or SEQ ID NO: 65, or a functional fragment or variant thereof or a pharmaceutically acceptable salt thereof.

[0255] In some embodiments, the expressible nucleic acid sequence encodes a fusion protein comprising one or a plurality of coronaviral envelope polypeptides or functional fragments thereof. In some embodiments, the fusion protein comprise a furin cleavage site. In some embodiments, the expressible nucleic acid sequence comprises a first nucleic acid sequence encoding, in a 5′ to 3′ orientation, at least three monomers of coronaviral envelope proteins. In some embodiments, the at least three monomers of coronaviral envelope proteins are separated by a furin cleavage site. In some embodiments, the furin cleavage site comprises at least about 60%, 65%, 70%, 75%, 80%, 85%, 90%, 95%, or 99% sequence identity to RRRRRR (SEQ ID NO: 67), or a functional fragment or variant thereof or a pharmaceutically acceptable salt thereof. In some embodiments, the furin cleavage site comprises the amino acid sequence of SEQ ID NO: 67, or a functional fragment or variant thereof or a pharmaceutically acceptable salt thereof. In some embodiments, the expressible nucleic acid sequence encodes a polypeptide free of carbohydrate proximate to at least 30 amino acids from the carboxy end of the polypeptide. In some embodiments, the expressible nucleic acid sequence encodes a polypeptide free of carbohydrate proximate to at least 20 amino acids from the carboxy end of the polypeptide. In some embodiments, the expressible nucleic acid sequence encodes a polypeptide free of carbohydrate proximate to at least 10 amino acids from the carboxy end of the polypeptide. In some embodiments, the expressible nucleic acid sequence encodes a polypeptide free of carbohydrate proximate to at least 50 amino acids from the carboxy end of the polypeptide.

[0256] In some embodiments, the expressible nucleic acid sequence of the disclosure comprises at least a first nucleic acid sequence encoding a first, a second and/or a third polypeptides, each first, second or third polypeptide comprising a viral antigen. In some embodiments, the expressible nucleic acid sequence encodes one or a plurality of fusion proteins, each fusion protein comprising at least a first, a second, and/or a third polypeptide contiguously linked by a linker sequence. In some embodiments, the expressible nucleic acid sequence of the disclosure comprises at least a first nucleic acid sequence encoding at least one self-assembling polypeptide. In some embodiments, the self-assembling polypeptide is at least one self-assembling component of a nanoparticle or at least one coronaviral monomer, the coronaviral monomer capable of assembling into a coronaviral trimer upon expression in a cell. In some embodiments, the expressible nucleic acid sequence comprises a nucleic acid sequence encoding a coronaviral antigen, but free of a nucleic acid sequence encoding a self-assembling polypeptide. In some embodiments, the expressible nucleic acid sequence of the disclosure comprises a nucleic acid sequence operably linked to a regulatory sequence and encodes a fusion peptide comprising one or a plurality of self-assembling polypeptides, wherein at least one of the self-assembling polypeptides is a self-assembling coronaviral antigen.

[0257] In some embodiments, upon administration to a subject a composition comprising the expressible nucleic acid sequence of the disclosure, the expressible nucleic acid sequence is transfected or transduced into an antigen presenting cell. After a plurality of expressible nucleic acid sequences are expressed, the self-assembling polypeptides assemble with into a non-native form of a viral antigen. In some embodiments, the non-native form of a viral antigen comprises a coronaviral trimer exposing an amino acid sequence that is not naturally exposed or free of carbohydrate as compared to its corresponding native form or variants thereof. Expression and presentation of the one or plurality of self-assembling polypeptides elicits an immune response against an epitope. In some embodiments, the epitope comprises a non-native secondary structure of the one or plurality of self-assembling polypeptides. In some embodiments, the compositions comprise a nucleic acid sequence encoding any combination of nucleic acid sequences disclosed herein or variants thereof. In some embodiments, the compositions comprise a viral particle that comprises an expressible nucleic acid sequence encoding any combination of nucleic acid sequences disclosed herein or variants thereof. The component of the self-assembling peptide can be any monomer that, upon expression, self-assembles into a particle comprising 7, 14, 27 or 60 peptides sided particle, each peptide side fused to at least one antigen from the Coronoviridae family. In some embodiments, the composition comprises a particle comprising 7, 14, 27 or 60 peptides sided particle, each peptide side is fused to at least one antigen from the Coronoviridae family, wherein the antigen is positioned in an energetically stable state as compared to the unassociated energy state. In some embodiments, the energetically stable state is identified by association of the peptide to an antibody through surface plasmon resonance (SPR). In some embodiments, the energetically stable state is measured by absorbance units when either a ligand for the antigen or the antigen is immobilized to a surface, and the other binding partner is then passed over the surface as analyte. In some embodiments, the association can be measured through SPR on a BIACORE® system.

[0258] A detailed discussion of the technical aspects of the BIACORE® instruments and the phenomenon of SPR may be found in U.S. Pat. No. 5,313,264 (the full disclosure of which is incorporated by reference herein in its entirety). In the BIACORE® system, the SPR response values are expressed in resonance units (RU). One RU represents a change of 0.0001° in the angle of minimum reflected light intensity. For an SPR based sensor system like the BIACORE® system, a difference in refractive index between the two guiding fluids of, say, about 100 RU may be convenient, and the fluid interface position may be determined by means of per se conventional sensorgrams.

[0259] In some embodiments, it may be preferred to keep the total flow rate constant when introducing the sample flow. In such a case, the flow rates of the two guiding fluids are reduced while maintaining the flow rate ratio between them. Assume, for example, that the flow rate of one guiding fluid is 70 μl/min and the flow rate of the other guiding fluid is 30 μl/min, the total flow rate being 100 μl/min, and that a sample fluid flow of 20 μl/min is introduced between the guiding fluids. To maintain the total fluid flow rate at 100 μl/min, the flow rates of the guiding fluids will have to be reduced to 60 and 20 μl/min, respectively. The position of a sample fluid flow on a surface may be presented in various ways. A non-limiting example of a experiment indicating the relative responses obtained at different detector rows as the sample flow is guided laterally across the sensing surface of a flow cell by two guiding buffers in a BIACORE® system equipped with a W-cell (BIACORE® S51 is a SPR-based biosensor instrument, normally equipped with two Y-type flow cells, each allowing a dual flow over the a sensor surface for hydrodynamic addressing; Biacore AB, Uppsala, Sweden). Total buffer flow can be set to 100 μl/min, and the flow rates of the two buffer flows can be changed in steps of 2 μl/min, starting with 2 μl/min for one buffer and 98 μl/min for the other. Sample fluid flow can be 20 μl/min all the time. Relative responses >0.1 (i.e. 10% coverage of the detector row) are represented are measured as absorbance over time. This approach thus permits convenient visual monitoring of the sample fluid flow.

[0260] In some embodiments, the stability of an antigen secondary structure with an elevated stability as compared to a native antigen or antigen not fused to self-assembling peptide is from about 10 to about 10,000 RU more than the RU from a control as measured by SPR. In some embodiments, the stability of an antigen secondary structure with an elevated stability as compared to a native antigen or antigen not fused to self-assembling peptide is from about 5 to about 1,000 RU more than the RU from a control as measured by SPR. In some embodiments, the stability of an antigen secondary structure with an elevated stability as compared to a native antigen or antigen not fused to self-assembling peptide is from about 100 to about 10,000 RU more than the RU from a control as measured by SPR. In some embodiments, the stability of an antigen secondary structure with an elevated stability as compared to a native antigen or antigen not fused to self-assembling peptide is from about 100 to about 500 RU more than the RU from a control as measured by SPR. In some embodiments, the stability of an antigen secondary structure with an elevated stability as compared to a native antigen or antigen not fused to self-assembling peptide is from about 100 to about 200 RU more than the RU from a control as measured by SPR.

[0261] 5. Regulatory Sequences

[0262] In some embodiments, the expressible nucleic acid sequence can be operably linked to one or a plurality of regulatory sequences. The term “regulatory sequence” as used herein refer to DNA sequences which are necessary to effect expression of sequences to which they are ligated. The term “regulatory sequence” is intended to include, as a minimum, all components necessary for expression and optionally additional advantageous components. Examples of regulatory sequences include, but not limited to, promoters, enhancers and other expression control elements (e.g., polyadenylation signals). Further examples of regulatory sequences are described in, for example, Goeddel, 1990, Gene Expression Technology: Methods in Enzymology 185, Academic Press, San Diego, Calif. and Baron et al., 1995, Nucleic Acids Res. 23:3605-06. In some embodiments, the regulatory sequence is a promoter sequence. As used herein, a “promoter” means a region of DNA upstream from the transcription start and which is involved in binding RNA polymerase and other proteins to start transcription. Reference herein to a “promoter” is to be taken in its broadest context and includes the transcriptional regulatory sequences derived from a classical eukaryotic genomic gene, including the TATA box which is required for accurate transcription initiation, with or without a CCAAT box sequence and additional regulatory elements (i.e. upstream activating sequences, enhancers and silencers) which alter gene expression in response to developmental and/or external stimuli, or in a tissue-specific manner. Consequently, a repressible promoter's rate of transcription decreases in response to a repressing agent. An inducible promoter's rate of transcription increases in response to an inducing agent. A constitutive promoter's rate of transcription is not specifically regulated, though it can vary under the influence of general metabolic conditions. The term “promoter” also includes the transcriptional regulatory sequences of a classical prokaryotic gene, in which case it may include a −35 box sequence and/or a −10 box transcriptional regulatory sequences. The term “promoter” is also used to describe a synthetic or fusion molecule, or derivative which confers, activates or enhances expression of a nucleic acid molecule in a cell, tissue or organ.

[0263] 6. Expressible Nucleic Acid Sequences

[0264] The expressible nucleic acid sequence comprised in the composition of the present disclosure can be in form of a DNA molecule, a RNA molecule or transcript, or a DNA/RNA hybrid. In some embodiments, the expressible nucleic acid sequence is in form of a DNA molecule. In some embodiments, the expressible nucleic acid sequence is in form of a RNA molecule or transcript. In some embodiments, the expressible nucleic acid sequence is in form of a DNA/RNA hybrid.

[0265] In some embodiments, the expressible nucleic acid sequence comprises a first nucleic acid sequence encoding a self-assembling polypeptide comprising at least about 70%, 75%, 80%, 85%, 90%, 95%, 96%, 97%, 98%, 99% or 100% sequence identity to SEQ ID NO: 8, or a functional fragment or variant thereof, and a second nucleic acid sequence encoding a viral antigen comprising at least about 70%, 75%, 80%, 85%, 90%, 95%, 96%, 97%, 98%, 99% or 100% sequence identity to SEQ ID NO: 60, SEQ ID NO: 62, SEQ ID NO: 64, SEQ ID NO: 66, SEQ ID NO: 171, SEQ ID NO: 172, SEQ ID NO: 173, SEQ ID NO: 174, SEQ ID NO: 175, SEQ ID NO: 176 or SEQ ID NO: 177, or a functional fragment or variant thereof. In some embodiments, the expressible nucleic acid sequence comprises a first nucleic acid sequence encoding a self-assembling polypeptide comprising at least about 70%, 75%, 80%, 85%, 90%, 95%, 96%, 97%, 98%, 99% or 100% sequence identity to SEQ ID NO: 10, or a functional fragment or variant thereof, and a second nucleic acid sequence encoding a viral antigen comprising at least about 70%, 75%, 80%, 85%, 90%, 95%, 96%, 97%, 98%, 99% or 100% sequence identity SEQ ID NO: 60, SEQ ID NO: 62, SEQ ID NO: 64, SEQ ID NO: 66, SEQ ID NO: 171, SEQ ID NO: 172, SEQ ID NO: 173, SEQ ID NO: 174, SEQ ID NO: 175, SEQ ID NO: 176 or SEQ ID NO: 177, or a functional fragment or variant thereof. In some embodiments, the expressible nucleic acid sequence comprises a first nucleic acid sequence encoding a self-assembling polypeptide comprising at least about 70%, 75%, 80%, 85%, 90%, 95%, 96%, 97%, 98%, 99% or 100% sequence identity to SEQ ID NO: 12, or a functional fragment or variant thereof, and a second nucleic acid sequence encoding a viral antigen comprising at least about 70%, 75%, 80%, 85%, 90%, 95%, 96%, 97%, 98%, 99% or 100% sequence identity to SEQ ID NO: 60, SEQ ID NO: 62, SEQ ID NO: 64, SEQ ID NO: 66, SEQ ID NO: 171, SEQ ID NO: 172, SEQ ID NO: 173, SEQ ID NO: 174, SEQ ID NO: 175, SEQ ID NO: 176 or SEQ ID NO: 177, or a functional fragment or variant thereof. In some embodiments, the expressible nucleic acid sequence comprises a first nucleic acid sequence encoding a self-assembling polypeptide comprising at least about 70%, 75%, 80%, 85%, 90%, 95%, 96%, 97%, 98%, 99% or 100% sequence identity to SEQ ID NO: 14, or a functional fragment or variant thereof, and a second nucleic acid sequence encoding a viral antigen comprising at least about 70%, 75%, 80%, 85%, 90%, 95%, 96%, 97%, 98%, 99% or 100% sequence identity to SEQ ID NO: 60, SEQ ID NO: 62, SEQ ID NO: 64, SEQ ID NO: 66, SEQ ID NO: 171, SEQ ID NO: 172, SEQ ID NO: 173, SEQ ID NO: 174, SEQ ID NO: 175, SEQ ID NO: 176 or SEQ ID NO: 177, or a functional fragment or variant thereof. In some embodiments, the expressible nucleic acid sequence comprises a first nucleic acid sequence encoding a self-assembling polypeptide comprising at least about 70%, 75%, 80%, 85%, 90%, 95%, 96%, 97%, 98%, 99% or 100% sequence identity to SEQ ID NO: 16, or a functional fragment or variant thereof, and a second nucleic acid sequence encoding a viral antigen comprising at least about 70%, 75%, 80%, 85%, 90%, 95%, 96%, 97%, 98%, 99% or 100% sequence identity to SEQ ID NO: 60, SEQ ID NO: 62, SEQ ID NO: 64, SEQ ID NO: 66, SEQ ID NO: 171, SEQ ID NO: 172, SEQ ID NO: 173, SEQ ID NO: 174, SEQ ID NO: 175, SEQ ID NO: 176 or SEQ ID NO: 177, or a functional fragment or variant thereof. In some embodiments, the expressible nucleic acid sequence comprises a first nucleic acid sequence encoding a self-assembling polypeptide comprising at least about 70%, 75%, 80%, 85%, 90%, 95%, 96%, 97%, 98%, 99% or 100% sequence identity to SEQ ID NO: 18, or a functional fragment or variant thereof, and a second nucleic acid sequence encoding a viral antigen comprising at least about 70%, 75%, 80%, 85%, 90%, 95%, 96%, 97%, 98%, 99% or 100% sequence identity to SEQ ID NO: 60, SEQ ID NO: 62, SEQ ID NO: 64, SEQ ID NO: 66, SEQ ID NO: 171, SEQ ID NO: 172, SEQ ID NO: 173, SEQ ID NO: 174, SEQ ID NO: 175, SEQ ID NO: 176 or SEQ ID NO: 177, or a functional fragment or variant thereof. In some embodiments, the expressible nucleic acid sequence comprises a first nucleic acid sequence encoding a self-assembling polypeptide comprising at least about 70%, 75%, 80%, 85%, 90%, 95%, 96%, 97%, 98%, 99% or 100% sequence identity to SEQ ID NO: 20, or a functional fragment or variant thereof, and a second nucleic acid sequence encoding a viral antigen comprising at least about 70%, 75%, 80%, 85%, 90%, 95%, 96%, 97%, 98%, 99% or 100% sequence identity to SEQ ID NO: 60, SEQ ID NO: 62, SEQ ID NO: 64, SEQ ID NO: 66, SEQ ID NO: 171, SEQ ID NO: 172, SEQ ID NO: 173, SEQ ID NO: 174, SEQ ID NO: 175, SEQ ID NO: 176 or SEQ ID NO: 177, or a functional fragment or variant thereof.

[0266] In some embodiments, the expressible nucleic acid sequence comprises a first nucleic acid sequence encoding a self-assembling polypeptide comprising at least about 70%, 75%, 80%, 85%, 90%, 95%, 96%, 97%, 98%, 99% or 100% sequence identity to SEQ ID NO: 8, or a functional fragment or variant thereof, and a second nucleic acid sequence encoding a viral antigen comprising at least about 70%, 75%, 80%, 85%, 90%, 95%, 96%, 97%, 98%, 99% or 100% sequence identity to SEQ ID NO: 175. In some embodiments, the expressible nucleic acid sequence comprises a first nucleic acid sequence encoding a self-assembling polypeptide comprising at least about 70%, 75%, 80%, 85%, 90%, 95%, 96%, 97%, 98%, 99% or 100% sequence identity to SEQ ID NO: 8, or a functional fragment or variant thereof, and a second nucleic acid sequence encoding a viral antigen comprising at least about 70%, 75%, 80%, 85%, 90%, 95%, 96%, 97%, 98%, 99% or 100% sequence identity to SEQ ID NO: 176. In some embodiments, the expressible nucleic acid sequence comprises a first nucleic acid sequence encoding a self-assembling polypeptide comprising at least about 70%, 75%, 80%, 85%, 90%, 95%, 96%, 97%, 98%, 99% or 100% sequence identity to SEQ ID NO: 8, or a functional fragment or variant thereof, and a second nucleic acid sequence encoding a viral antigen comprising at least about 70%, 75%, 80%, 85%, 90%, 95%, 96%, 97%, 98%, 99% or 100% sequence identity to SEQ ID NO: 177. In some embodiments, the expressible nucleic acid sequence comprises a first nucleic acid sequence encoding a self-assembling polypeptide comprising at least about 70%, 75%, 80%, 85%, 90%, 95%, 96%, 97%, 98%, 99% or 100% sequence identity to SEQ ID NO: 12, or a functional fragment or variant thereof, and a second nucleic acid sequence encoding a viral antigen comprising at least about 70%, 75%, 80%, 85%, 90%, 95%, 96%, 97%, 98%, 99% or 100% sequence identity to SEQ ID NO: 175. In some embodiments, the expressible nucleic acid sequence comprises a first nucleic acid sequence encoding a self-assembling polypeptide comprising at least about 70%, 75%, 80%, 85%, 90%, 95%, 96%, 97%, 98%, 99% or 100% sequence identity to SEQ ID NO: 12, or a functional fragment or variant thereof, and a second nucleic acid sequence encoding a viral antigen comprising at least about 70%, 75%, 80%, 85%, 90%, 95%, 96%, 97%, 98%, 99% or 100% sequence identity to SEQ ID NO: 176. In some embodiments, the expressible nucleic acid sequence comprises a first nucleic acid sequence encoding a self-assembling polypeptide comprising at least about 70%, 75%, 80%, 85%, 90%, 95%, 96%, 97%, 98%, 99% or 100% sequence identity to SEQ ID NO: 12, or a functional fragment or variant thereof, and a second nucleic acid sequence encoding a viral antigen comprising at least about 70%, 75%, 80%, 85%, 90%, 95%, 96%, 97%, 98%, 99% or 100% sequence identity to SEQ ID NO: 177.

[0267] In some embodiments, the expressible nucleic acid sequence comprises a first nucleic acid sequence encoding a leader sequence comprising at least about 70%, 75%, 80%, 85%, 90%, 95%, 96%, 97%, 98%, 99% or 100% sequence identity to SEQ ID NO: 1, or a functional fragment or variant thereof, and a second nucleic acid sequence encoding a viral antigen comprising at least about 70%, 75%, 80%, 85%, 90%, 95%, 96%, 97%, 98%, 99% or 100% sequence identity to SEQ ID NO: 60, SEQ ID NO: 62, SEQ ID NO: 64, SEQ ID NO: 66, SEQ ID NO: 171, SEQ ID NO: 172, SEQ ID NO: 173, SEQ ID NO: 174, SEQ ID NO: 175, SEQ ID NO: 176 or SEQ ID NO: 177, or a functional fragment or variant thereof. In some embodiments, the expressible nucleic acid sequence comprises a first nucleic acid sequence encoding a leader sequence comprising at least about 70%, 75%, 80%, 85%, 90%, 95%, 96%, 97%, 98%, 99% or 100% sequence identity to SEQ ID NO: 5, or a functional fragment or variant thereof, and a second nucleic acid sequence encoding a viral antigen comprising at least about 70%, 75%, 80%, 85%, 90%, 95%, 96%, 97%, 98%, 99% or 100% sequence identity to SEQ ID NO: 60, SEQ ID NO: 62, SEQ ID NO: 64, SEQ ID NO: 66, SEQ ID NO: 171, SEQ ID NO: 172, SEQ ID NO: 173, SEQ ID NO: 174, SEQ ID NO: 175, SEQ ID NO: 176 or SEQ ID NO: 177, or a functional fragment or variant thereof.

[0268] In some embodiments, the expressible nucleic acid sequence comprises a first nucleic acid sequence encoding a leader sequence comprising at least about 70%, 75%, 80%, 85%, 90%, 95%, 96%, 97%, 98%, 99% or 100% sequence identity to SEQ ID NO: 1, or a functional fragment or variant thereof, and a second nucleic acid sequence encoding a viral antigen comprising at least about 70%, 75%, 80%, 85%, 90%, 95%, 96%, 97%, 98%, 99% or 100% sequence identity to SEQ ID NO: 171. In some embodiments, the expressible nucleic acid sequence comprises a first nucleic acid sequence encoding a leader sequence comprising at least about 70%, 75%, 80%, 85%, 90%, 95%, 96%, 97%, 98%, 99% or 100% sequence identity to SEQ ID NO: 1, or a functional fragment or variant thereof, and a second nucleic acid sequence encoding a viral antigen comprising at least about 70%, 75%, 80%, 85%, 90%, 95%, 96%, 97%, 98%, 99% or 100% sequence identity to SEQ ID NO: 172. In some embodiments, the expressible nucleic acid sequence comprises a first nucleic acid sequence encoding a leader sequence comprising at least about 70%, 75%, 80%, 85%, 90%, 95%, 96%, 97%, 98%, 99% or 100% sequence identity to SEQ ID NO: 1, or a functional fragment or variant thereof, and a second nucleic acid sequence encoding a viral antigen comprising at least about 70%, 75%, 80%, 85%, 90%, 95%, 96%, 97%, 98%, 99% or 100% sequence identity to SEQ ID NO: 173. In some embodiments, the expressible nucleic acid sequence comprises a first nucleic acid sequence encoding a leader sequence comprising at least about 70%, 75%, 80%, 85%, 90%, 95%, 96%, 97%, 98%, 99% or 100% sequence identity to SEQ ID NO: 1, or a functional fragment or variant thereof, and a second nucleic acid sequence encoding a viral antigen comprising at least about 70%, 75%, 80%, 85%, 90%, 95%, 96%, 97%, 98%, 99% or 100% sequence identity to SEQ ID NO: 174. In some embodiments, the expressible nucleic acid sequence comprises a first nucleic acid sequence encoding a leader sequence comprising at least about 70%, 75%, 80%, 85%, 90%, 95%, 96%, 97%, 98%, 99% or 100% sequence identity to SEQ ID NO: 1, or a functional fragment or variant thereof, and a second nucleic acid sequence encoding a viral antigen comprising at least about 70%, 75%, 80%, 85%, 90%, 95%, 96%, 97%, 98%, 99% or 100% sequence identity to SEQ ID NO: 175. In some embodiments, the expressible nucleic acid sequence comprises a first nucleic acid sequence encoding a leader sequence comprising at least about 70%, 75%, 80%, 85%, 90%, 95%, 96%, 97%, 98%, 99% or 100% sequence identity to SEQ ID NO: 1, or a functional fragment or variant thereof, and a second nucleic acid sequence encoding a viral antigen comprising at least about 70%, 75%, 80%, 85%, 90%, 95%, 96%, 97%, 98%, 99% or 100% sequence identity to SEQ ID NO: 176. In some embodiments, the expressible nucleic acid sequence comprises a first nucleic acid sequence encoding a leader sequence comprising at least about 70%, 75%, 80%, 85%, 90%, 95%, 96%, 97%, 98%, 99% or 100% sequence identity to SEQ ID NO: 1, or a functional fragment or variant thereof, and a second nucleic acid sequence encoding a viral antigen comprising at least about 70%, 75%, 80%, 85%, 90%, 95%, 96%, 97%, 98%, 99% or 100% sequence identity to SEQ ID NO: 177. In some embodiments, the expressible nucleic acid sequence comprises a first nucleic acid sequence encoding a leader sequence comprising at least about 70%, 75%, 80%, 85%, 90%, 95%, 96%, 97%, 98%, 99% or 100% sequence identity to SEQ ID NO: 5, or a functional fragment or variant thereof, and a second nucleic acid sequence encoding a viral antigen comprising at least about 70%, 75%, 80%, 85%, 90%, 95%, 96%, 97%, 98%, 99% or 100% sequence identity to SEQ ID NO: 171. In some embodiments, the expressible nucleic acid sequence comprises a first nucleic acid sequence encoding a leader sequence comprising at least about 70%, 75%, 80%, 85%, 90%, 95%, 96%, 97%, 98%, 99% or 100% sequence identity to SEQ ID NO: 5, or a functional fragment or variant thereof, and a second nucleic acid sequence encoding a viral antigen comprising at least about 70%, 75%, 80%, 85%, 90%, 95%, 96%, 97%, 98%, 99% or 100% sequence identity to SEQ ID NO: 172. In some embodiments, the expressible nucleic acid sequence comprises a first nucleic acid sequence encoding a leader sequence comprising at least about 70%, 75%, 80%, 85%, 90%, 95%, 96%, 97%, 98%, 99% or 100% sequence identity to SEQ ID NO: 5, or a functional fragment or variant thereof, and a second nucleic acid sequence encoding a viral antigen comprising at least about 70%, 75%, 80%, 85%, 90%, 95%, 96%, 97%, 98%, 99% or 100% sequence identity to SEQ ID NO: 173. In some embodiments, the expressible nucleic acid sequence comprises a first nucleic acid sequence encoding a leader sequence comprising at least about 70%, 75%, 80%, 85%, 90%, 95%, 96%, 97%, 98%, 99% or 100% sequence identity to SEQ ID NO: 5, or a functional fragment or variant thereof, and a second nucleic acid sequence encoding a viral antigen comprising at least about 70%, 75%, 80%, 85%, 90%, 95%, 96%, 97%, 98%, 99% or 100% sequence identity to SEQ ID NO: 174. In some embodiments, the expressible nucleic acid sequence comprises a first nucleic acid sequence encoding a leader sequence comprising at least about 70%, 75%, 80%, 85%, 90%, 95%, 96%, 97%, 98%, 99% or 100% sequence identity to SEQ ID NO: 5, or a functional fragment or variant thereof, and a second nucleic acid sequence encoding a viral antigen comprising at least about 70%, 75%, 80%, 85%, 90%, 95%, 96%, 97%, 98%, 99% or 100% sequence identity to SEQ ID NO: 175. In some embodiments, the expressible nucleic acid sequence comprises a first nucleic acid sequence encoding a leader sequence comprising at least about 70%, 75%, 80%, 85%, 90%, 95%, 96%, 97%, 98%, 99% or 100% sequence identity to SEQ ID NO: 5, or a functional fragment or variant thereof, and a second nucleic acid sequence encoding a viral antigen comprising at least about 70%, 75%, 80%, 85%, 90%, 95%, 96%, 97%, 98%, 99% or 100% sequence identity to SEQ ID NO: 176. In some embodiments, the expressible nucleic acid sequence comprises a first nucleic acid sequence encoding a leader sequence comprising at least about 70%, 75%, 80%, 85%, 90%, 95%, 96%, 97%, 98%, 99% or 100% sequence identity to SEQ ID NO: 5, or a functional fragment or variant thereof, and a second nucleic acid sequence encoding a viral antigen comprising at least about 70%, 75%, 80%, 85%, 90%, 95%, 96%, 97%, 98%, 99% or 100% sequence identity to SEQ ID NO: 177.

[0269] Exemplary expressible nucleic acid sequences include, but not limited to those provided in TABLE X. In some embodiments, a nucleic acid molecule of the disclosure comprises one or more expressible nucleic acid sequences below:

TABLE X
Exemplary Expressible Nucleic Acid Sequences (DNA and RNA) of the
Disclosure and the corresponding coding polypeptide sequences (underlined amino acid
residues are glycan sites).

I. CoV2 Nanoparticle Constructs
WuhanS_FP12_L9GT60_pVax
ggatccgccaccatggactggacctggattctgttcctggtggccgccgccacaagggtgcacagcatgcagatctacgaaggaaaa
ctgaccgctgagggactgaggttcggaattgtcgcaagccgcgcgaatcacgcactggtggataggctggtggaaggcgctatcga
cgcaattgtccggcacggcgggagagaggaagacatcacactggtgagagtctgcggcagctgggagattcccgtggcagctgga
gaactggctcgaaaggaggacatcgatgccgtgatcgctattggggtcctgtgccgaggagcaactcccagcttcgactacatcgcct
cagaagtgagcaaggggctggctgatctgtccctggagctgaggaaacctatcacttttggcgtgattactgccgacaccctggaaca
ggcaatcgaggcggccggcacctgccatggaaacaaaggctgggaagcagccctgtgcgctattgagatggcaaatctgttcaaat
ctctgcgaggaggctccggaggatctggagggagtggaggctcaggaggaggcgacaccatcacactgccatgccgccctgcac
cacctccacattgtagctccaacatcaccggcctgattctgacaagacaggggggatatagtaacgataataccgtgattttcaggccct
caggaggggactggagggacatcgcacgatgccagattgctggaacagtggtctctactcagctgtttctgaacggcagtctggctga
ggaagaggtggtcatccgatctgaagactggcgggataatgcaaagtcaatttgtgtgcagctgaacacaagcgtcgagatcaattgc
actggcgcagggcactgtaacatttctcgggccaaatgggataataccctgaagcagatcgccagtaaactgagagagcagtacggc
aataagacaatcatcttcaagccttctagtggaggcgacccagagttcgtgaaccatagctttaattgcgggggagagttcttttattgtg
attccacacagctgttcgatagcacttggtttgattccaccggtgggagcggaagtggcggttccggatcattcattgaagaccttctcttt
aacaaggtgaccctcgccgatgcaggtttcattaagcaatatggtgattgcctgggagacatcgcggctcgtgatcttatttgtgcgcag
aaattttaatga (SEQ ID NO: 68)
ggauccgccaccauggacuggaccuggauucuguuccugguggccgccgccacaagggugcacagcaugcagaucuacg
aaggaaaacugaccgcugagggacugagguucggaauugucgcaagccgcgcgaaucacgcacugguggauaggcuggu
ggaaggcgcuaucgacgcaauuguccggcacggcgggagagaggaagacaucacacuggugagagucugcggcagcugg
gagauucccguggcagcuggagaacuggcucgaaaggaggacaucgaugccgugaucgcuauugggguccugugccgag
gagcaacucccagcuucgacuacaucgccucagaagugagcaaggggcuggcugaucugucccuggagcugaggaaacc
uaucacuuuuggcgugauuacugccgacacccuggaacaggcaaucgaggcggccggcaccugccauggaaacaaaggcu
gggaagcagcccugugcgcuauugagauggcaaaucuguucaaaucucugcgaggaggcuccggaggaucuggagggag
uggaggcucaggaggaggcgacaccaucacacugccaugccgcccugcaccaccuccacauuguagcuccaacaucaccg
gccugauucugacaagacaggggggauauaguaacgauaauaccgugauuuucaggcccucaggaggggacuggaggga
caucgcacgaugccagauugcuggaacaguggucucuacucagcuguuucugaacggcagucuggcugaggaagaggug
gucauccgaucugaagacuggcgggauaaugcaaagucaauuugugugcagcugaacacaagcgucgagaucaauugca
cuggcgcagggcacuguaacauuucucgggccaaaugggauaauacccugaagcagaucgccaguaaacugagagagcag
uacggcaauaagacaaucaucuucaagccuucuaguggaggcgacccagaguucgugaaccauagcuuuaauugcgggg
gagaguuuuuuauugugauuccacacagcuguucgauagcacuugguuugauuccaccggugggagcggaaguggcg
uugccugggagacaucgcggcucgugaucuuauuuguggcagaaauuuuaauga (SEQ ID NO: 69)
MDWTWILFLVAAATRVHSMQIYEGKLTAEGLRFGIVASRANHALVDRLVEGAIDAI
VRHGGREEDITLVRVCGSWEIPVAAGELARKEDIDAVIAIGVLCRGATPSFDYIASEV
SKGLADLSLELRKPITFGVITADTLEQAIEAAGTCHGNKGWEAALCAIEMANLFKSLR
GGSGGSGGSGGSGGGDTITLPCRPAPPPHCSSNITGLILTRQGGYSNDNTVIFRPSGGD
WRDIARCQIAGTVVSTQLFLNGSLAEEEVVIRSEDWRDNAKSICVQLNTSVEINCTGA

[chemical structure]

[chemical structure]

QKF** (SEQ ID NO: 70)
WuhanS_FP_L9GT60_pVax
ggatccgccaccatggactggacctggattctgttcctggtggccgccgccacaagggtgcacagcatgcagatctacgaaggaaaa
ctgaccgctgagggactgaggttcggaattgtcgcaagccgcgcgaatcacgcactggtggataggctggtggaaggcgctatcga
cgcaattgtccggcacggcgggagagaggaagacatcacactggtgagagtctgcggcagctgggagattcccgtggcagctgga
gaactggctcgaaaggaggacatcgatgccgtgatcgctattggggtcctgtgccgaggagcaactcccagcttcgactacatcgcct
cagaagtgagcaaggggctggctgatctgtccctggagctgaggaaacctatcacttttggcgtgattactgccgacaccctggaaca
ggcaatcgaggcggccggcacctgccatggaaacaaaggctgggaagcagccctgtgcgctattgagatggcaaatctgttcaaat
ctctgcgaggaggctccggaggatctggagggagtggaggctcaggaggaggcgacaccatcacactgccatgccgccctgcac
cacctccacattgtagctccaacatcaccggcctgattctgacaagacaggggggatatagtaacgataataccgtgattttcaggccct
caggaggggactggagggacatcgcacgatgccagattgctggaacagtggtctctactcagctgtttctgaacggcagtctggctga
ggaagaggtggtcatccgatctgaagactggcgggataatgcaaagtcaatttgtgtgcagctgaacacaagcgtcgagatcaattgc
actggcgcagggcactgtaacatttctcgggccaaatgggataataccctgaagcagatcgccagtaaactgagagagcagtacggc
aataagacaatcatcttcaagccttctagtggaggcgacccagagttcgtgaaccatagctttaattgcgggggagagttcttttattgtg
attccacacagctgttcgatagcacttggtttgattccaccggtgggagcggaagtggcggttccggaccttcaaagagatctttcattg
aagacctgcttttcaacaaggtctaatga (SEQ ID NO: 71)
ggauccgccaccauggacuggaccuggauucuguuccugguggccgccgccacaagggugcacagcaugcagaucuacg
aaggaaaacugaccgcugagggacugagguucggaauugucgcaagccgcgcgaaucacgcacugguggauaggcuggu
ggaaggcgcuaucgacgcaauuguccggcacggcgggagagaggaagacaucacacuggugagagucugcggcagcugg
gagauucccguggcagcuggagaacuggcucgaaaggaggacaucgaugccgugaucgcuauugggguccugugccgag
gagcaacucccagcuucgacuacaucgccucagaagugagcaaggggcuggcugaucugucccuggagcugaggaaacc
uaucacuuuuggcgugauuacugccgacacccuggaacaggcaaucgaggcggccggcaccugccauggaaacaaaggcu
gggaagcagcccugugcgcuauugagauggcaaaucuguucaaaucucugcgaggaggcuccggaggaucuggagggag
uggaggcucaggaggaggcgacaccaucacacugccaugccgcccugcaccaccuccacauuguagcuccaacaucaccg
gccugauucugacaagacaggggggauauaguaacgauaauaccgugauuuucaggcccucaggaggggacuggaggga
caucgcacgaugccagauugcuggaacaguggucucuacucagcuguuucugaacggcagucuggcugaggaagaggug
gucauccgaucugaagacugggggauaaugcaaagucaauuugugugcagcugaacacaagcgucgagaucaauugca
cuggcgcagggcacuguaacauuucucgggccaaaugggauaauacccugaagcagaucgccaguaaacugagagagcag
uacggcaauaagacaaucaucuucaagccuucuaguggaggcgacccagaguucgugaaccauagcuuuaauugcgggg
gagaguucuuuuauugugauuccacacagcuguucgauagcacuugguuugauuccaccggugggagcggaaguggcg
guuccggaccuucaaagagaucuuucauugaagaccugcuuuucaacaaggucuaauga (SEQ ID NO: 72)
MDWTWILFLVAAATRVHSMQIYEGKLTAEGLRFGIVASRANHALVDRLVEGAIDAI
VRHGGREEDITLVRVCGSWEIPVAAGELARKEDIDAVIAIGVLCRGATPSFDYIASEV
SKGLADLSLELRKPITFGVITADTLEQAIEAAGTCHGNKGWEAALCAIEMANLFKSLR
GGSGGSGGSGGSGGGDTITLPCRPAPPPHCSSNITGLILTRQGGYSNDNTVIFRPSGGD
WRDIARCQIAGTVVSTQLFLNGSLAEEEVVIRSEDWRDNAKSICVQLNTSVEINCTGA

[chemical structure]

[chemical structure]

(SEQ ID NO: 73)
WuhanS_RBD_gmax_180_pVax
ggatccgccaccatggactggacctggattctgttcctggtggccgccgccacaagggtgcacagcctctcaattgccccaacgttga
tcaaccgggacaagccatacacgaaagaggaacttatggagatattgcggttggccattatagctgaactcgatgcaattaatctctatg
aacaaatggcccgctatagcgaagacgaaaatgtgagaaagatcttgttggacgtcgctagggaagagaaagcacacgtaggagag
ttcatggctttgttgcttaacctcgaccctgagcaagtcacagagctgaagggcgggttcgaggaagttaaagaattgaccggtataga
agctcacattaatgacaacaagaaagaggaaagtaatgtagagtatttcgagaagctcagatctgccttgttggatggagtcaacaagg
gtcgcagcttgctcaaacatctgcccgttacaagaatagaagggcagtcttttcgagtagacatcatcaaatttgaggacggcgtccga
gtggttaaacaagagtataagcctataccccttcttaagaagaagttctacgtcggcattcgagaactgaatgacgggacatatgatgtc
agcattgctactaaagccggtgagctgctggttaaagacgaagaaagtcttgtgatccgggaaattttgtcaacggaaggcatcaagaa
aatgaaattgtcatcctgggacaatccagaagaagccctgaatgatttgatgaatgcgctccaagaagctagcaatgctagtgctggcc
ccttcggccttattatcaatccaaagcggtacgccaaactgctgaagatctatgaaaagtcaggtaagatgctcgtagaagtactcaagg
aaatcttccggggtggaataatcgtaactcttaatatcgacgaaaacaaagtgattatcttcgctaatacgcccgccgttctggacgtggt
ggtgggtcaagacgttacgctccaggagcttggtccggaaggggatgatgtcgcattcctggtcagtgaagccattggtataagaatc
aagaacccggaagctatagttgttctcgaaggcgggtctggtgggagcggtggtagtggtggttctggtggtggtgggtcaggtggc
ggctcaggcggcggcaatctgtgccctttcggtgaggtctttaatgcaacaagatttgcaagtgtttacgcctggaaccgtaagcgcatt
agcaactgcactgccgattactctgtgctgtacaacagcacaagcttttccacatttaaatgttacggggtttcccctaccaacctcagcg
acctctgctttactaatgtttacgcagattccttcgttatccgaggcgatgaagtccggcagatagctcccggacagaccggcaaaatcg
ctgactacaactataaactgccgaacgacagcacagggtgtgtaattgcttggaacagcaataacctcgattcaaaggttggcggaaat
tacaattatctttaccgtctgttccggaaaagcaatctgaaaccctttgagagagacatcagcacggaaatttatcaagccggttcaacac
catgtaacggagttgaaggctttaattgctattttcccctgcaatcttacggatttcaacctacgaacggggtcggttaccaaccttaccgg
gtggtcgtgctgagcttcgaattgcttcatgccccagccaccgtgtgtgggccataatga (SEQ ID NO: 74)
ggauccgccaccauggacuggaccuggauucuguuccugguggccgccgccacaagggugcacagccucucaauugccc
gaugcaauuaaucucuaugaacaaauggcccgcuauagcgaagacgaaaaugugagaaagaucuuguuggacgucgcua
gggaagagaaagcacacguaggagaguucauggcuuuguugcuuaaccucgacccugagcaagucacagagcugaaggg
ggguucgaggaaguuaaagaauugaccgguauagaagcucacauuaaugacaacaagaaagaggaaaguaauguagag
uauuucgagaagcucagaucugccuuguuggauggagucaacaagggucgcagcuugcucaaacaucugcccguuacaa
gaauagaagggcagucuuuucgaguagacaucaucaaauuugaggacggcguccgagugguuaaacaagaguauaagcc
uauaccccuucuuaagaagaaguucuacgucggcauucgagaacugaaugacgggacauaugaugucagcauugcuacu
ugaaauugucauccugggacaauccagaagaagcccugaaugauuugaugaaugcgcuccaagaagcuagcaaugcuag
cgcuaauacgcccgccguucuggacgugguggugggucaagacguuacgcuccaggagcuugguccggaaggggauga
ugucgcauuccuggucagugaagccauugguauaagaaucaagaacccggaagcuauaguuguucucgaaggcgggucu
ggugggagcggugguaguggugguucuggugguggugggucagguggcggcucaggcggcggcaaucugugcccuuu
cggugaggucuuuaaugcaacaagauuugcaaguguuuacgccuggaaccguaagcgcauuagcaacugcacugccgau
cuuuacuaauguuuacgcagauuccuucguuauccgaggcgaugaaguccggcagauagcucccggacagaccggcaaa
aucgcugacuacaacuauaaacugccgaacgacagcacaggguguguaauugcuuggaacagcaauaaccucgauucaaa
uucaaccuacgaacggggucgguuaccaaccuuaccggguggucgugcugagcuucgaauugcuucaugccccagccac
cgugugugggccauaauga (SEQ ID NO: 75)
MDWTWILFLVAAATRVHSLSIAPTLINRDKPYTKEELMEILRLAIIAELDAINLYEQM
ARYSEDENVRKILLDVAREEKAHVGEFMALLLNLDPEQVTELKGGFEEVKELTGIEA
HINDNKKEESNVEYFEKLRSALLDGVNKGRSLLKHLPVTRIEGQSFRVDIIKFEDGVR
VVKQEYKPIPLLKKKFYVGIRELNDGTYDVSIATKAGELLVKDEESLVIREILSTEGIK
KMKLSSWDNPEEALNDLMNALQEASNASAGPFGLIINPKRYAKLLKIYEKSGKMLV
EVLKEIFRGGIIVTLNIDENKVIIFANTPAVLDVVVGQDVTLQELGPEGDDVAFLVSEA
IGIRIKNPEAIVVLEGGSGGSGGSGGSGGGGSGGGSGGGNLCPFGEVFNATRFASVYA
WNRKRISNCTADYSVLYNSTSFSTFKCYGVSPTNLSDLCFTNVYADSFVIRGDEVRQI
APGQTGKIADYNYKLPNDSTGCVIAWNSNNLDSKVGGNYNYLYRLFRKSNLKPFER
DISTEIYQAGSTPCNGVEGFNCYFPLQSYGFQPTNGVGYQPYRVVVLSFELLHAPATV
CGP** (SEQ ID NO: 76)
WuhanS_RBD_gmax_LS_pVax
ggatccgccaccatggactggacctggattctgttcctggtggccgccgccacaagggtgcacagcatgcagatctacgaaggaaaa
ctgaccgctgagggactgaggttcggaattgtcgcaagccgcgcgaatcacgcactggtggataggctggtggaaggcgctatcga
cgcaattgtccggcacggcgggagagaggaagacatcacactggtgagagtctgcggcagctgggagattcccgtggcagctgga
gaactggctcgaaaggaggacatcgatgccgtgatcgctattggggtcctgtgccgaggagcaactcccagcttcgactacatcgcct
cagaagtgagcaaggggctggctgatctgtccctggagctgaggaaacctatcacttttggcgtgattactgccgacaccctggaaca
ggcaatcgaggcggccggcacctgccatggaaacaaaggctgggaagcagccctgtgcgctattgagatggcaaatctgttcaaat
ctctgcgaggaggctccggaggatctggagggagtggaggctcaggaggaggcaatctgtgccctttcggtgaggtctttaatgcaa
caagatttgcaagtgtttacgcctggaaccgtaagcgcattagcaactgcactgccgattactctgtgctgtacaacagcacaagcttttc
cacatttaaatgttacggggtttcccctaccaacctcagcgacctctgctttactaatgtttacgcagattccttcgttatccgaggcgatga
agtccggcagatagctcccggacagaccggcaaaatcgctgactacaactataaactgccgaacgacagcacagggtgtgtaattgc
ttggaacagcaataacctcgattcaaaggttggcggaaattacaattatctttaccgtctgttccggaaaagcaatctgaaaccctttgag
agagacatcagcacggaaatttatcaagccggttcaacaccatgtaacggagttgaaggctttaattgctattttcccctgcaatcttacg
gatttcaacctacgaacggggtcggttaccaaccttaccgggtggtcgtgctgagcttcgaattgcttcatgccccagccaccgtgtgtg
ggccataatga (SEQ ID NO: 77)
ggauccgccaccauggacuggaccuggauucuguuccugguggccgccgccacaagggugcacagcaugcagaucuacg
aaggaaaacugaccgcugagggacugagguucggaauugucgcaagccgcgcgaaucacgcacugguggauaggcuggu
ggaaggcgcuaucgacgcaauuguccggcacggcgggagagaggaagacaucacacuggugagagucugcggcagcugg
gagauucccguggcagcuggagaacuggcucgaaaggaggacaucgaugccgugaucgcuauugggguccugugccgag
gagcaacucccagcuucgacuacaucgccucagaagugagcaaggggcuggcugaucugucccuggagcugaggaaacc
uaucacuuuuggcgugauuacugccgacacccuggaacaggcaaucgaggcggccggcaccugccauggaaacaaaggcu
gggaagcagcccugugcgcuauugagauggcaaaucuguucaaaucucugcgaggaggcuccggaggaucuggagggag
uggaggcucaggaggaggcaaucugugcccuuucggugaggucuuuaaugcaacaagauuugcaaguguuuacgccug
gaaccguaagcgcauuagcaacugcacugccgauuacucugugcuguacaacagcacaagcuuuuccacauuuaaauguu
acgggguuuccccuaccaaccucagcgaccucugcuuuacuaauguuuacgcagauuccuucguuauccgaggcgauga
aguccggcagauagcucccggacagaccggcaaaaucgcugacuacaacuauaaacugccgaacgacagcacagggugug
uaauugcuuggaacagcaauaaccucgauucaaagguuggcggaaauuacaauuaucuuuaccgucuguuccggaaaag
caaucugaaacccuuugagagagacaucagcacggaaauuuaucaagccgguucaacaccauguaacggaguugaaggcu
uuaauugcuauuuuccccugcaaucuuacggauuucaaccuacgaacggggucgguuaccaaccuuaccggguggucgu
gcugagcuucgaauugcuucaugccccagccaccgugugugggccauaauga (SEQ ID NO: 78)
MDWTWILFLVAAATRVHSMQIYEGKLTAEGLRFGIVASRANHALVDRLVEGAIDAI
VRHGGREEDITLVRVCGSWEIPVAAGELARKEDIDAVIAIGVLCRGATPSFDYIASEV
SKGLADLSLELRKPITFGVITADTLEQAIEAAGTCHGNKGWEAALCAIEMANLFKSLR
GGSGGSGGSGGSGGGNLCPFGEVFNATRFASVYAWNRKRISNCTADYSVLYNSTSFS
TFKCYGVSPTNLSDLCFTNVYADSFVIRGDEVRQIAPGQTGKIADYNYKLPNDSTGC
VIAWNSNNLDSKVGGNYNYLYRLFRKSNLKPFERDISTEIYQAGSTPCNGVEGFNCY
FPLQSYGFQPTNGVGYQPYRVVVLSFELLHAPATVCGP** (SEQ ID NO: 79)
CoV2-RBD_7mer_pVax
ggatccgccaccatggactggacctggattctgttcctggtggccgccgccacaagggtgcacagcaatctctgtccattcggagagg
ttttcaacgcgacgagattcgcctcagtttatgcctggaaccgtaaacggatatcaaactgcgtggctgactactctgttttatacaactcc
gcctctttcagtaccttcaagtgttacggtgtcagccctaccaaattgaatgatctctgctttacaaatgtttacgcagattcttttgtcataag
gggcgatgaggttcggcaaatcgcccccgggcagacaggcaaaattgcggactataattataagttgccagacgatttcacgggctg
cgtcatcgcctggaacagtaataatctcgattcaaaagtgggtgggaactacaattatctctacaggttattccggaagtcaaatctgaag
cccttcgaacgcgacatcagtacggagatttaccaggctggaagcactccgtgcaacggggtggaggggttcaactgttattttcctct
gcagtcttatgggtttcagcccactaatggtgtgggataccagccgtacagagtcgtggtgctgtccttcgaacttctccacgctcccgc
caccgtctgtggtcccgggggatctggcggatcagggggtagtggaggtagcggcggcgggaagaaacagggagacgctgacgt
ctgtggggaagtggcttacatccagagcgtggtgtctgattgccatgtaccaaccgcggagctcaggactcttttagagattcggaaac
tgtttctggagatccaaaagctgaaggtcgaactccagggcctgtcaaaagaatgataa (SEQ ID NO: 80)
ggauccgccaccauggacuggaccuggauucuguuccugguggccgccgccacaagggugcacagcaaucucuguccau
ucggagagguuuucaacgcgacgagauucgccucaguuuaugccuggaaccguaaacggauaucaaacugcguggcuga
cuacucuguuuuauacaacuccgccucuuucaguaccuucaaguguuacggugucagcccuaccaaauugaaugaucuc
ugcuuuacaaauguuuacgcagauucuuuugucauaaggggcgaugagguucggcaaaucgcccccgggcagacaggca
aaauugcggacuauaauuauaaguugccagacgauuucacgggcugcgucaucgccuggaacaguaauaaucucgauuc
aaaagugggugggaacuacaauuaucucuacagguuauuccggaagucaaaucugaagcccuucgaacgcgacaucagua
cggagauuuaccaggcuggaagcacuccgugcaacgggguggagggguucaacuguuauuuuccucugcagucuuaug
gguuucagcccacuaauggugugggauaccagccguacagagucguggugcuguccuucgaacuucuccacgcucccgc
caccgucuguggucccgggggaucuggcggaucaggggguaguggagguagcggcggcgggaagaaacagggagacgc
ugacgucuguggggaaguggcuuacauccagagcguggugucugauugccauguaccaaccgcggagcucaggacucuu
uuagagauucggaaacuguuucuggagauccaaaagcugaaggucgaacuccagggccugucaaaagaaugauaa
(SEQ ID NO: 81)
NLCPFGEVFNATRFASVYAWNRKRISNCVADYSVLYNSASFSTFKCYGVSPTKLNDL
CFTNVYADSFVIRGDEVRQIAPGQTGKIADYNYKLPDDFTGCVIAWNSNNLDSKVGG
NYNYLYRLFRKSNLKPFERDISTEIYQAGSTPCNGVEGFNCYFPLQSYGFQPTNGVGY
QPYRVVVLSFELLHAPATVCGPGGSGGSGGSGGSGGGKKQGDADVCGEVAYIQSVV
SDCHVPTAELRTLLEIRKLFLEIQKLKVELQGLSKE** (SEQ ID NO: 82)
CoV2-RBD_gmax_14mer_pVax
ggatccgccaccatggactggacctggattctgttcctggtggccgccgccacaagggtgcacagcaatctgtgtcccttcggggag
gttttcaatgctaccagatttgccagtgtgtatgcttggaatcggaagagaatctccaattgcacagcagattattcagttctctacaactct
acatcttttagtacctttaagtgttacggggtgagtcccactaacctttcagatttatgtttcaccaatgtctacgctgactccttcgtgatccg
gggggatgaggtgagacagattgcacctggacaaactggcaaaatcgccgactacaattacaaacttccaaacgactctacagggtg
tgtaatcgcttggaacagcaataatctggatagcaaagtaggcggcaattataattacctctacagactgtttaggaagtccaacctgaa
accatttgagagggacatcagcactgaaatctaccaggggggagcaccccttgtaatggagtcgagggtttcaactgttacttcccac
tgcagagctacgggttccagcctaccaatggtgtcggttaccagccctatcgagttgtggtgttgtcattcgaactgttacatgcacctgc
aacggtctgtggacccgggggttcagggggtagtggggggtccggtgggagcggtgggggcaagaaacaggggatgaatccgct
catcgccgccgcctctgtgatagctgctggcctggccgtgggcctggcatcaatcgggcccggggtgggccaaggcaccgccgcc
ggccaggccgtcgagggtattgcaaggcagccggaggcagaaggcaaaattagagggaccctgttgttgtctttagcgttcatggaa
gccctcactatttacggactggttgtggccttagcccttctgtttgccaatcctttcgtgtaatga (SEQ ID NO: 83)
ggauccgccaccauggacuggaccuggauucuguuccugguggccgccgccacaagggugcacagcaaucugugucccu
ucggggagguuuucaaugcuaccagauuugccaguguguaugcuuggaaucggaagagaaucuccaauugcacagcaga
uuauucaguucucuacaacucuacaucuuuuaguaccuuuaaguguuacggggugagucccacuaaccuuucagauuua
uguuucaccaaugucuacgcugacuccuucgugauccggggggaugaggugagacagauugcaccuggacaaacuggca
aaaucgccgacuacaauuacaaacuuccaaacgacucuacaggguguguaaucgcuuggaacagcaauaaucuggauagc
aaaguaggcggcaauuauaauuaccucuacagacuguuuaggaaguccaaccugaaaccauuugagagggacaucagcac
ugaaaucuaccaggggggagcaccccuuguaauggagucgaggguuucaacuguuacuucccacugcagagcuacggg
uuccagccuaccaauggugucgguuaccagcccuaucgaguugugguguugucauucgaacuguuacaugcaccugcaa
cggucuguggacccggggguucaggggguagugggggguccggugggagcggugggggcaagaaacaggggaugaauc
cgcucaucgccgccgccucugugauagcugcuggccuggccgugggccuggcaucaaucgggcccggggugggccaagg
caccgccgccggccaggccgucgaggguauugcaaggcagccggaggcagaaggcaaaauuagagggacccuguuguug
ucuuuagcguucauggaagcccucacuauuuacggacugguuguggccuuagcccuucuguuugccaauccuuucgug
uaauga (SEQ ID NO: 84)
NLCPFGEVFNATRFASVYAWNRKRISNCTADYSVLYNSTSFSTFKCYGVSPTNLSDL
CFTNVYADSFVIRGDEVRQIAPGQTGKIADYNYKLPNDSTGCVIAWNSNNLDSKVGG
NYNYLYRLFRKSNLKPFERDISTEIYQAGSTPCNGVEGFNCYFPLQSYGFQPTNGVGY
QPYRVVVLSFELLHAPATVCGPGGSGGSGGSGGSGGGKKQGMNPLIAAASVIAAGL
AVGLASIGPGVGQGTAAGQAVEGIARQPEAEGKIRGTLLLSLAFMEALTIYGLVVAL
ALLFANPFV** (SEQ ID NO: 85)
CoV2-RBD_gmax_24mer_pVax
ggatccgccaccatggactggacctggattctgttcctggtggccgccgccacaagggtgcacagcaacctgtgccccttcggggaa
gtttttaatgccactcggtttgcctccgtttacgcctggaacaggaagcgcatttccaactgcaccgccgactatagcgtcctttataacag
cacatccttttcaactttcaagtgttacggggtttcccctacaaatctctctgacctgtgttttacaaatgtgtatgcagactctttcgtgattag
gggagatgaggtgcgccagatcgcccctggacagaccggaaaaatcgccgattataattataagcttcccaacgactccacaggctg
tgtaattgcctggaattctaataacctggactctaaagtgggcggtaactacaattatctgtatagactcttcagaaagtctaacctcaaac
catttgaacgggacatctcaaccgagatctaccaagccgggtccaccccctgtaacggcgtggaaggcttcaactgttatttccccctc
cagtcctatggcttccaacccacaaatggagtcggctaccagccttacagggtggttgtgctgtcatttgagctcctccacgctcctgcc
actgtatgtgggccaggcgggtccggaggttcaggcggtagcggcggctcaggtggaggaggactgtctaaagatattataaaactg
ctgaacgaacaagtgaacaaggagatgcagagcagcaacctttacatgtctatgagcagttggtgttacactcactctctcgacggcgc
cggcctgttcctgtttgatcacgccgcggaggagtatgaacatgctaaaaagcttatcatcttcctcaacgaaaataacgtgccagtgca
gttgacctctatttccgctcccgaacataagttcgaaggcctcacacagatctttcagaaggcttacgagcatgaacaacacatttcaga
gagcatcaacaacatcgtggaccatgcgatcaagtctaaggaccacgcgacttttaacttcctccagtggtatgtcgccgaacagcatg
aggaggaagtgttgttcaaagacatcctggacaagattgaacttattggcaacgaaaaccacggcctctacctggccgatcagtacgt
gaaaggtatcgcgaagtcacgaaagagttaatga (SEQ ID NO: 86)
ggauccgccaccauggacuggaccuggauucuguuccugguggccgccgccacaagggugcacagcaaccugugccccu
ucggggaaguuuuuaaugccacucgguuugccuccguuuacgccuggaacaggaagcgcauuuccaacugcaccgccga
cuauagcguccuuuauaacagcacauccuuuucaacuuucaaguguuacgggguuuccccuacaaaucucucugaccug
uguuuuacaaauguguaugcagacucuuucgugauuaggggagaugaggugcgccagaucgccccuggacagaccggaa
aaaucgccgauuauaauuauaagcuucccaacgacuccacaggcuguguaauugccuggaauucuaauaaccuggacucu
aaagugggcgguaacuacaauuaucuguauagacucuucagaaagucuaaccucaaaccauuugaacgggacaucucaac
cgagaucuaccaagccggguccacccccuguaacggcguggaaggcuucaacuguuauuucccccuccaguccuauggcu
uccaacccacaaauggagucggcuaccagccuuacagggugguugugcugucauuugagcuccuccacgcuccugccac
uguaugugggccaggcggguccggagguucaggcgguagcggcggcucagguggaggaggacugucuaaagauauuau
aaaacugcugaacgaacaagugaacaaggagaugcagagcagcaaccuuuacaugucuaugagcaguugguguuacacuc
acucucucgacggcgccggccuguuccuguuugaucacgccgcggaggaguaugaacaugcuaaaaagcuuaucaucuu
ccucaacgaaaaaacgugccagugcaguugaccucuauuuccgcucccgaacauaaguucgaaggccucacacagaucu
uucagaaggcuuacgagcaugaacaacacauuucagagagcaucaacaacaucguggaccaugcgaucaagucuaaggac
cacgcgacuuuuaacuuccuccagugguaugucgccgaacagcaugaggaggaaguguuguucaaagacauccuggaca
agauugaacuuauuggcaacgaaaaccacggccucuaccuggccgaucaguacgugaaagguaucgcgaagucacgaaag
aguuaauga (SEQ ID NO: 87)
NLCPFGEVFNATRFASVYAWNRKRISNCTADYSVLYNSTSFSTFKCYGVSPTNLSDL
CFTNVYADSFVIRGDEVRQIAPGQTGKIADYNYKLPNDSTGCVIAWNSNNLDSKVGG
NYNYLYRLFRKSNLKPFERDISTEIYQAGSTPCNGVEGFNCYFPLQSYGFQPTNGVGY
QPYRVVVLSFELLHAPATVCGPGGSGGSGGSGGSGGGGLSKDIIKLLNEQVNKEMQS
SNLYMSMSSWCYTHSLDGAGLFLFDHAAEEYEHAKKLIIFLNENNVPVQLTSISAPE
HKFEGLTQIFQKAYEHEQHISESINNIVDHAIKSKDHATFNFLQWYVAEQHEEEVLFK
DILDKIELIGNENHGLYLADQYVKGIAKSRKS** (SEQ ID NO: 88)
CoV2-RBD_gmax_7mer_pVax
ggatccgccaccatggactggacctggattctgttcctggtggccgccgccacaagggtgcacagcaatctttgtccattcggggaag
tgtttaacgccactaggttcgctagtgtgtacgcctggaatcggaagcggatttcaaattgtaccgccgattattctgtcctttacaacagt
accagcttttccacttttaaatgctacggagtatctcctacaaacttgagtgacctgtgttttacgaacgtctacgctgactctttcgttattag
gggagacgaagttagacaaatcgctccaggccagactggcaaaatagccgactataactataaactcccaaacgattccacaggctg
cgttattgcctggaacagcaataacctggactctaaagtcggaggtaactataactacttgtacaggctcttccgcaagagcaaccttaa
gccatttgagcgagatatctccaccgagatttatcaggcagggagcaccccatgcaacggagtggaggggtttaattgctattttccact
gcagtcctatggctttcaaccaacaaacggagtaggctaccaaccgtatcgcgttgtcgtcctgagtttcgaactgttgcacgcccctgc
gaccgtatgtggccccggcggctcaggggggagtggtgggagcgggggctctgggggggggaaaaaacagggggacgccgat
gtttgcggcgaggtggcctatatacagtcagtggtctccgactgtcatgtaccaactgccgaactcaggactcttctggagataaggaa
gttgttcctggagatacagaagctcaaggtcgagttacagggtctctcaaaggaatgatga (SEQ ID NO: 89)
ggauccgccaccauggacuggaccuggauucuguuccugguggccgccgccacaagggugcacagcaaucuuuguccau
ucggggaaguguuuaacgccacuagguucgcuaguguguacgccuggaaucggaagcggauuucaaauuguaccgccga
uuauucuguccuuuacaacaguaccagcuuuuccacuuuuaaaugcuacggaguaucuccuacaaacuugagugaccug
uguuuuacgaacgucuacgcugacucuuucguuauuaggggagacgaaguuagacaaaucgcuccaggccagacuggca
aaauagccgacuauaacuauaaacucccaaacgauuccacaggcugcguuauugccuggaacagcaauaaccuggacucu
aaagucggagguaacuauaacuacuuguacaggcucuuccgcaagagcaaccuuaagccauuugagcgagauaucucac
cgagauuuaucaggcagggagcaccccaugcaacggaguggagggguuuaauugcuauuuuccacugcaguccuauggc
uuucaaccaacaaacggaguaggcuaccaaccguaucgcguugucguccugaguuucgaacuguugcacgccccugcgac
cguauguggccccggcggcucaggggggaguggugggagcgggggcucugggggggggaaaaaacagggggacgccga
uguuugcggcgagguggccuauauacagucaguggucuccgacugucauguaccaacugccgaacucaggacucuucug
gagauaaggaaguuguuccuggagauacagaagcucaaggucgaguuacagggucucucaaaggaaugauga (SEQ
ID NO: 90)
NLCPFGEVFNATRFASVYAWNRKRISNCTADYSVLYNSTSFSTFKCYGVSPTNLSDL
CFTNVYADSFVIRGDEVRQIAPGQTGKIADYNYKLPNDSTGCVIAWNSNNLDSKVGG
NYNYLYRLFRKSNLKPFERDISTEIYQAGSTPCNGVEGFNCYFPLQSYGFQPTNGVGY
QPYRVVVLSFELLHAPATVCGPGGSGGSGGSGGSGGGKKQGDADVCGEVAYIQSVV
SDCHVPTAELRTLLEIRKLFLEIQKLKVELQGLSKE** (SEQ ID NO: 91)
II. CoV2 Trimer Constructs
WuhanS_SolTri_FS1_pVax
ggatccgccaccatggactggacctggattctgttcctggtggccgccgccacaagggtgcacagcatgtttgttttcctcgtcctcttg
cccctcgtctctagtcaatgtgttaatttgaccacacgaacccaactgccacctgcctacaccaacagttttaccagaggagtttattaccc
cgacaaagtattcaggtcatcagtgctgcatagtacccaagacttgtttctccccttctttagtaacgttacatggttccacgccattcacgt
gagtgggacaaatggaacaaaacgcttcgacaaccctgtgctccccttcaacgatggtgtatactttgctagtaccgagaagagcgga
attatccgcgggtggatctttggaacaacactggacagcaaaacccaaagcctgcttatcgttaacaatgctactaacgttgtgatcaaa
gtgtgtgaattccaattttgtaatgatccgtttctcggagtttactaccacaagaacaacaaaagttggatggaaagcgaattccgggtgta
ctcctcagcaaataattgtacctttgagtacgtgagtcaaccctttctcatggacctggaaggaaaacaaggcaatttcaagaacctgcg
ggagtttgtgttcaagaatattgatggctattttaaaatttattctaagcatactccaatcaacctggtaagggacctgccccaaggcttttca
gccctcgaaccgcttgtagatttgcctatcgggataaacattacgcgatttcaaacgctgttggcgctccaccggagctacttgactcctg
gcgatagcagctccggttggaccgctggagcggccgcttattacgtcggctatctgcaacccaggacgttcctgctcaagtataatga
gaacgggacgattacagatgcagtggattgtgcgcttgatcctctctctgaaaccaagtgcactctcaagtctttcacggtggagaaag
gcatttatcaaactagtaactttcgagtacagcctactgagagtatcgttaggttcccaaacattacgaacctctgtccctttggagaagtat
tcaatgctactcgctttgcaagcgtttatgcctggaatcgcaaacgcatcagcaattgcgtcgccgattattctgtcctttataatagcgcat
cattttcaacatttaagtgttatggggtgagtccgactaagctcaatgatttgtgcttcacaaacgtctacgcggacagctttgtgataagg
ggcgacgaagttcgccaaatcgctcccggccaaactgggaaaatcgcggattacaactataaattgcccgatgacttcaccggctgtg
tcattgcctggaactctaataacctcgatagcaaggtggggggaactataattatttgtaccgcctgtttcgaaagtccaatctcaaacc
ctttgagcgggacatttccactgagatctatcaggcagggagtacaccttgtaacggcgtggaaggctttaactgttattttcccctgcaa
agttacggttttcaacctaccaacggagttggctatcaaccttatcgagtcgtcgtgctgagttttgagttgctgcatgccccagccaccgt
ctgtggacctaagaaatccaccaacctcgtgaagaacaagtgcgtcaattttaattttaacggcctgactgggaccggtgtcctcaccga
atctaataagaagttcctgccatttcaacaattcggacgggacatcgctggaacgacagatgctgtccgtgatcctcagacactggaga
ttctggacatcactccttgcagctttggcggagtctctgttattactcccggaactaacacttctaaccaagttgctgtcctctatcaggacg
tgaactgcactgaagtgcccgtggcaatccatgcaggccaactgacccccacttggagagtctacagcacggggagcaatgtcttcc
aaacaagggccggatgccttattggagcggagcacgttaataactcatacgagtgtgatataccaattggagcaggaatttgtgcttcct
accagacccaaactaacagtcccagggggctaggagtgtcgctagccagagcatcatcgcgtacacaatgtctctcggcgcagaa
aactcagtcgcctatagcaacaactcaattgccattcccaccaacttcacaatttccgtaaccactgaaattctgcctgttagcatgacaaa
gacatcagttgattgtacaatgtacatatgtggagacagcaccgaatgcagcaaccttttgcttcaatatggctccttttgtacccaactca
acagggcactcactgggatagcagtcgaacaagataagaacacccaagaggtgtttgcacaagtcaaacaaatctataaaacgccgc
ccataaaagactttggcggattcaatttcagccagatcttgcctgacccatccaagccttcaaagaggagctttattgaggatcttctcttc
aataaagtgacactggcggacgccggttttatcaagcaatatggtgattgtctcggtgacatagcagctagagatctgatttgcgctcag
aaatttaatggccttactgtgcttcccccactgctgaccgatgaaatgattgcacaatatacaagcgcccttttggccgggactattacttc
cgggtggaccttcggcgccggcgccgctctgcaaattcctttcgcaatgcagatggcctaccggttcaatggcataggtgtcactcag
aacgttctttatgagaatcagaaactcatcgcgaaccagtttaattcagcgatcggcaagattcaggactccttgtcctcaactgcgtcag
ctttgggaaaacttcaagacgtcgtgaaccagaatgctcaggcgctcaataccctggtgaaacaacttagcagtaactttggggctattt
ctagcggtccaaacgatatactgtcccgactcccgaaagtcgaggccgaagtccaaattgatcgtcttattacagggagactccaatct
cttcaaacatatgtcactcaacagctcattagggctgcggagatccgggcttccgcaaatcttgccgcgacaaagatgagtgaatgcgt
cttgggacaatctaagagggtggacttttgtggaaaaggttaccatctcatgtccttccctcagtcagcgccccacggagtcgttttcctg
cacgtaacgtatgtcccggctcaagagaagaacttcactactgcaccagcgatttgccatgacggtaaagcccattttccccgcgagg
gcgtatttgtgtccaacggtacccactggttcgtaacccaacggaatttctatgagccccaaatcattacaacagataatacagatgtttcc
gggaattgcgacgttgttattggcatcgttaacaacaccgtttacgatcccttgcaaccggaactggactcctttaaagaagaactcgac
aagtattttaagaaccacacatcaccagatgtcgatcttggcgacatttccggcattaacgcttcagttgtaaatattcagaaagagatag
atcgcctgaatgaggtggctaagaacctgaacgaatctctcattgatctccaagagctgggaaagtacgaacaatacatcaaatggcct
tctgggcgtcgccgaagacgacgagggtccggcggctcagggagcggctatatccctgaggcgcctcgggacggacaagcttatg
tgaggaaagatggagaatgggtattgctgtcaaccttcctgggataatga (SEQ ID NO: 92)
ggauccgccaccauggacuggaccuggauucuguuccugguggccgccgccacaagggugcacagcauguuuguuuucc
ucguccucuugccccucgucucuagucaauguguuaauuugaccacacgaacccaacugccaccugccuacaccaacagu
uuuaccagaggaguuuauuaccccgacaaaguauucaggucaucagugcugcauaguacccaagacuuguuucuccccu
ucuuuaguaacguuacaugguuccacgccauucacgugagugggacaaauggaacaaaacgcuucgacaacccugugcuc
cccuucaacgaugguguauacuuugcuaguaccgagaagagcggaauuauccgcggguggaucuuuggaacaacacugg
acagcaaaacccaaagccugcuuaucguuaacaaugcuacuaacguugugaucaaagugugugaauuccaauuuuguaau
gauccguuucucggaguuuacuaccacaagaacaacaaaaguuggauggaaagcgaauuccggguguacuccucagcaaa
uaauuguaccuuugaguacgugagucaacccuuucucauggaccuggaaggaaaacaaggcaauuucaagaaccugcgg
gaguuuguguucaagaauauugauggcuauuuuaaaauuuauucuaagcauacuccaaucaaccugguaagggaccugc
cccaaggcuuuucagcccucgaaccgcuuguagauuugccuaucgggauaaacauuacgcgauuucaaacgcuguuggc
gcuccaccggagcuacuugacuccuggcgauagcagcuccgguuggaccgcuggagcggccgcuuauuacgucggcuau
cugcaacccaggacguuccugcucaaguauaaugagaacgggacgauuacagaugcaguggauugugcgcuugauccuc
ucucugaaaccaagugcacucucaagucuuucacgguggagaaaggcauuuaucaaacuaguaacuuucgaguacagccu
acugagaguaucguuagguucccaaacauuacgaaccucugucccuuuggagaaguauucaaugcuacucgcuuugcaa
gcguuuaugccuggaaucgcaaacgcaucagcaauugcgucgccgauuauucuguccuuuauaauagcgcaucauuuuc
aacauuuaaguguuauggggugaguccgacuaagcucaaugauuugugcuucacaaacgucuacgcggacagcuuugug
auaaggggcgacgaaguucgccaaaucgcucccggccaaacugggaaaaucgcggauuacaacuauaaauugcccgauga
cuucaccggcugugucauugccuggaacucuaauaaccucgauagcaaggugggcgggaacuauaauuauuuguaccgc
cuguuucgaaaguccaaucucaaacccuuugagcgggacauuuccacugagaucuaucaggcagggaguacaccuugua
acggcguggaaggcuuuaacuguuauuuuccccugcaaaguuacgguuuucaaccuaccaacggaguuggcuaucaacc
uuaucgagucgucgugcugaguuuugaguugcugcaugccccagccaccgucuguggaccuaagaaauccaccaaccuc
gugaagaacaagugcgucaauuuuaauuuuaacggccugacugggaccgguguccucaccgaaucuaauaagaaguucc
ugccauuucaacaauucggacgggacaucgcuggaacgacagaugcuguccgugauccucagacacuggagauucugga
caucacuccuugcagcuuuggcggagucucuguuauuacucccggaacuaacacuucuaaccaaguugcuguccuuau
caggacgugaacugcacugaagugcccguggcaauccaugcaggccaacugacccccacuuggagagucuacagcacggg
gagcaaugucuuccaaacaagggccggaugccuuauuggagcggagcacguuaauaacucauacgagugugauauacca
auuggagcaggaauuugugcuuccuaccagacccaaacuaacagucccagggggcuaggagugucgcuagccagagca
ucaucgcguacacaaugucucucggcgcagaaaacucagucgccuauagcaacaacucaauugccauucccaccaacuuca
caauuuccguaaccacugaaauucugccuguuagcaugacaaagacaucaguugauuguacaauguacauauguggaga
cagcaccgaaugcagcaaccuuuugcuucaauauggcuccuuuuguacccaacucaacagggcacucacugggauagcag
ucgaacaagauaagaacacccaagagguguuugcacaagucaaacaaaucuauaaaacgccgcccauaaaagacuuuggcg
gauucaauuucagccagaucuugccugacccauccaagccuucaaagaggagcuuuauugaggaucuucucuucaauaaa
gugacacuggcggacgccgguuuuaucaagcaauauggugauugucucggugacauagcagcuagagaucugauuugc
gcucagaaauuuaauggccuuacugugcuucccccacugcugaccgaugaaaugauugcacaauauacaagcgcccuuuu
ggccgggacuauuacuuccggguggaccuucggcgccggcgccgcucugcaaauuccuuucgcaaugcagauggccuac
cgguucaauggcauaggugucacucagaacguucuuuaugagaaucagaaacucaucgcgaaccaguuuaauucagcga
ucggcaagauucaggacuccuuguccucaacugcgucagcuuugggaaaacuucaagacgucgugaaccagaaugcuca
ggcgcucaauacccuggugaaacaacuuagcaguaacuuuggggcuauuucuagcgguccaaacgauauacugucccga
cucccgaaagucgaggccgaaguccaaauugaucgucuuauuacagggagacuccaaucucuucaaacauaugucacuca
acagcucauuagggcugcggagauccgggcuuccgcaaaucuugccgcgacaaagaugagugaaugcgucuugggacaa
ucuaagaggguggacuuuuguggaaaagguuaccaucucauguccuucccucagucagcgccccacggagucguuuucc
ugcacguaacguaugucccggcucaagagaagaacuucacuacugcaccagcgauuugccaugacgguaaagcccauuuu
ccccgcgagggcguauuuguguccaacgguacccacugguucguaacccaacggaauuucuaugagccccaaaucauuac
aacagauaauacagauguuuccgggaauugcgacguuguuauuggcaucguuaacaacaccguuuacgaucccuugcaa
ccggaacuggacuccuuuaaagaagaacucgacaaguauuuuaagaaccacacaucaccagaugucgaucuuggcgacau
uuccggcauuaacgcuucaguuguaaauauucagaaagagauagaucgccugaaugagguggcuaagaaccugaacgaa
ucucucauugaucuccaagagcugggaaaguacgaacaauacaucaaauggccuucugggcgucgccgaagacgacgagg
guccggcggcucagggagcggcuauaucccugaggcgccucgggacggacaagcuuaugugaggaaagauggagaaugg
guauugcugucaaccuuccugggauaauga (SEQ ID NO: 93)
MDWTWILFLVAAATRVHSMFVFLVLLPLVSSQCVNLTTRTQLPPAYTNSFTRGVYY
PDKVFRSSVLHSTQDLFLPFFSNVTWFHAIHVSGTNGTKRFDNPVLPFNDGVYFASTE
KSGIIRGWIFGTTLDSKTQSLLIVNNATNVVIKVCEFQFCNDPFLGVYYHKNNKSWM
ESEFRVYSSANNCTFEYVSQPFLMDLEGKQGNFKNLREFVFKNIDGYFKIYSKHTPIN
LVRDLPQGFSALEPLVDLPIGINITRFQTLLALHRSYLTPGDSSSGWTAGAAAYYVGY
LQPRTFLLKYNENGTITDAVDCALDPLSETKCTLKSFTVEKGIYQTSNFRVQPTESIVR
FPNITNLCPFGEVFNATRFASVYAWNRKRISNCVADYSVLYNSASFSTFKCYGVSPTK
LNDLCFTNVYADSFVIRGDEVRQIAPGQTGKIADYNYKLPDDFTGCVIAWNSNNLDS
KVGGNYNYLYRLFRKSNLKPFERDISTEIYQAGSTPCNGVEGFNCYFPLQSYGFQPTN
GVGYQPYRVVVLSFELLHAPATVCGPKKSTNLVKNKCVNFNFNGLTGTGVLTESNK
KFLPFQQFGRDIAGTTDAVRDPQTLEILDITPCSFGGVSVITPGTNTSNQVAVLYQDV
NCTEVPVAIHAGQLTPTWRVYSTGSNVFQTRAGCLIGAEHVNNSYECDIPIGAGICAS
YQTQTNSPRRARSVASQSIIAYTMSLGAENSVAYSNNSIAIPTNFTISVTTEILPVSMTK
TSVDCTMYICGDSTECSNLLLQYGSFCTQLNRALTGIAVEQDKNTQEVFAQVKQIYK
TPPIKDFGGFNFSQILPDPSKPSKRSFIEDLLFNKVTLADAGFIKQYGDCLGDIAARDLI
CAQKFNGLTVLPPLLTDEMIAQYTSALLAGTITSGWTFGAGAALQIPFAMQMAYRFN
GIGVTQNVLYENQKLIANQFNSAIGKIQDSLSSTASALGKLQDVVNQNAQALNTLVK
QLSSNFGAISSGPNDILSRLPKVEAEVQIDRLITGRLQSLQTYVTQQLIRAAEIRASANL
AATKMSECVLGQSKRVDFCGKGYHLMSFPQSAPHGVVFLHVTYVPAQEKNFTTAPA
ICHDGKAHFPREGVFVSNGTHWFVTQRNFYEPQIITTDNTDVSGNCDVVIGIVNNTV
YDPLQPELDSFKEELDKYFKNHTSPDVDLGDISGINASVVNIQKEIDRLNEVAKNLNE
SLIDLQELGKYEQYIKWPSGRRRRRRGSGGSGSGYIPEAPRDGQAYVRKDGEWVLLS
TFLG** (SEQ ID NO: 94)
WuS_IgE_StrepHis_pVax
gccaccatggactggacctggatactctttctcgtagcagcagccacacgagtgcattcaagccaatgcgtgaatctgactacaagga
ctcagctgccccctgcatacacgaacagtttcacccgcggtgtatattatccggacaaagtattcaggtctagtgtgctgcactcaaccc
aggatttgtttctgcccttcttctctaacgtgacatggttccacgccatccatgtgtcaggtacgaacggtaccaagagatttgataacccg
gtactgccatttaatgacggcgtctattttgcttccactgagaagagcaacatcataagaggctggatctttggaactactctggacagca
aaacccagagcttgctgatcgtgaacaacgcgacaaatgtagtgatcaaagtatgtgagtttcaattctgtaacgatcccttccttggggt
ttattaccataagaataataagagttggatggagtccgaatttagagtttactcctcagctaataactgtacgttcgagtatgtctcccaacc
ttttcttatggatctcgaagggaaacagggtaactttaagaatcttcgagaatttgtgttcaagaacatcgacggttattttaagatctacagt
aagcatactcccataaatctggttagagatctcccgcaaggattttccgcactggagccccttgtagaccttcccattggaataaacataa
cacgtttccagacactcctcgctctgcataggtcatatctcaccccgggcgattcttccagcggatggaccgctggagctgctgcttact
acgtaggatacctgcaaccccggacatttctgctcaagtataacgaaaatgggactattacggacgctgtggactgtgctcttgaccca
cttagcgagacaaaatgcacgctgaaaagttttaccgtggagaaggggatctatcaaacgagcaattttagggttcagcctaccgaatc
aatcgtcagatttcccaatatcactaacctgtgccctttcggggaagttttcaacgcaacccggtttgcgagcgtatacgcttggaatcgc
aaaaggataagcaattgcgttgccgattactccgttctttacaattcagcatcattttctacttttaaatgctacggcgtgtctcccacaaaac
tgaatgacctgtgttttacgaacgtgtatgcagacagctttgtgattaggggtgatgaggttagacaaatcgcaccaggtcagaccggta
agatcgctgattacaactacaaactgcccgatgacttcacaggatgcgtgattgcctggaattccaacaatctggattctaaggttggcg
gcaattacaattacctgtataggttgtttcggaagtcaaacctgaaacccttcgaaagagacatttctaccgagatttatcaagcgggttca
actccttgtaatggagttgaaggcttcaattgttactttccccttcaatcatacggattccaaccaaccaatggggtcggataccagccata
tagggttgttgtcctgtcattcgaacttctccacgcaccagccaccgtatgtggacccaagaagtctactaatctggtgaagaacaaatg
cgtcaatttcaactttaatgggttgaccggcactggggtgctgactgaatccaacaagaagtttctgccgttccaacaattcggacgcga
tatcgctgatacaaccgatgccgttagagatccccaaacattggagattctggatattacgccttgttcattcggtggtgtttccgtgattac
ccctggcaccaatacgagtaaccaagtggcggtgctgtatcaagatgtgaactgtactgaagtgccggtggctatacatgccgaccaa
ctcacaccaacatggagagtatatagcacgggttccaatgtgtttcaaactagggctggctgtttgattggcgctgaacatgttaataattc
ctatgaatgcgatattcccatcggtgccgggatttgcgcaagttatcaaacgcaaactaactcccccgggtcagcatcctctgtcgcttc
ccaatcaatcatcgcctataccatgagtcttggggcagaaaattccgttgcttattctaacaattccattgcaattcctacgaacttcaccat
ctcagttactacagaaatacttcccgtgtcaatgacgaagacatccgtagattgcacaatgtatatatgtggggactcaactgaatgctca
aacctgctcctgcaatacggatcattttgcacccaactgaacagagcattgaccggtatagccgtggagcaagataagaacactcaag
aagtattcgcccaggtcaaacaaatctataaaactccgcctataaaagattttggcggctttaacttttcccaaatactgcctgacccaagt
aagccctcaaaacgtagctttatagaggacctcttgtttaataaggtgacactcgctgacgctggattcattaagcaatatggtgactgctt
gggagatattgccgcccgcgatctcatttgtgcacaaaagttcaacggcctcacagtcctgccccctctgctgacggatgaaatgatcg
ctcaatacacctcagctctcctggcaggcaccataacaagcgggtggacatttggtgccggggcagcactgcaaatcccattcgcaat
gcaaatggcttataggttcaatgggatcggcgtaactcaaaatgtcctctacgagaaccagaaactcatagctaaccaattcaattctgc
aatcgggaaaatccaggactccctgagctcaacggccagcgcactgggcaagctccaagatgtggtcaaccaaaacgcacaagca
ctgaatactcttgtgaaacaactcagctccaatttcggggcaatatcaagtgtcctcaatgatattcttagcaggcttgatccacccgaag
ccgaggtgcagatcgacaggctcataacaggcaggctccagtcccttcaaacgtatgtaactcagcaactgattcgggctgccgagat
tcgagcttcagctaatttggcagctacgaagatgagcgaatgcgtcctgggacagtctaaaagagtagacttttgcggcaaagggtatc
atctgatgagcttcccacaaagtgctccacatggcgtggttttcctgcatgtcacttatgttcccgcacaagagaagaacttcactaccgc
accagcgatctgtcacgatggtaaagcacatttcccgcgggaaggcgtattcgtatctaacggcacccactggttcgttactcaacgca
acttttatgaaccacaaatcattacaaccgataacacttttgtttcaggcaattgcgatgttgtcatcggcattgtgaataacactgtgtacg
atccacttcaaccagaattggacagctttaaagaggagcttgataagtatttcaagaatcatacctctcccgacgtggacctcggggaca
tctctggaataaatgctagcgtcgttaatatacagaaagagattgatcgtctgaacgaagtggctaagaatctgaatgaaagccttatcga
tctgcaagaactggggaagtacgaacagggatacataccggaagccccacgcgacggtcaggcttatgttaggaaggatggagaat
gggttttgctctccacgtttctcgggcttgaagttttgttccaaggaccctggtcacacccccaatttgagaaacaccatcaccaccatca
ccaccactgataa (SEQ ID NO: 95)
gccaccauggacuggaccuggauacucuuucucguagcagcagccacacgagugcauucaagccaaugcgugaaucugac
uacaaggacucagcugcccccugcauacacgaacaguuucacccgcgguguauauuauccggacaaaguauucaggucua
gugugcugcacucaacccaggauuuguuucugcccuucuucucuaacgugacaugguuccacgccauccaugugucagg
uacgaacgguaccaagagauuugauaacccgguacugccauuuaaugacggcgucuauuuugcuuccacugagaagagc
aacaucauaagaggcuggaucuuuggaacuacucuggacagcaaaacccagagcuugcugaucgugaacaacgcgacaaa
uguagugaucaaaguaugugaguuucaauucuguaacgaucccuuccuugggguuuauuaccauaagaauaauaagagu
uggauggaguccgaauuuagaguuuacuccucagcuaauaacuguacguucgaguaugucucccaaccuuuucuuaugg
aucucgaagggaaacaggguaacuuuaagaaucuucgagaauuuguguucaagaacaucgacgguuauuuuaagaucua
caguaagcauacucccauaaaucugguuagagaucucccgcaaggauuuuccgcacuggagccccuuguagaccuuccca
uuggaauaaacauaacacguuuccagacacuccucgcucugcauaggucauaucucaccccgggcgauucuuccagcgga
uggaccgcuggagcugcugcuuacuacguaggauaccugcaaccccggacauuucugcucaaguauaacgaaaauggga
cuauuacggacgcuguggacugugcucuugacccacuuagcgagacaaaaugcacgcugaaaaguuuuaccguggagaa
ggggaucuaucaaacgagcaauuuuaggguucagccuaccgaaucaaucgucagauuucccaauaucacuaaccugugcc
cuuucggggaaguuuucaacgcaacccgguuugcgagcguauacgcuuggaaucgcaaaaggauaagcaauugcguugc
cgauuacuccguucuuuacaauucagcaucauuuucuacuuuuaaaugcuacggcgugucucccacaaaacugaaugacc
uguguuuuacgaacguguaugcagacagcuuugugauuaggggugaugagguuagacaaaucgcaccaggucagaccg
guaagaucgcugauuacaacuacaaacugcccgaugacuucacaggaugcgugauugccuggaauuccaacaaucuggau
ucuaagguuggcggcaauuacaauuaccuguauagguuguuucggaagucaaaccugaaacccuucgaaagagacauuu
cuaccgagauuuaucaagcggguucaacuccuuguaauggaguugaaggcuucaauuguuacuuuccccuucaaucaua
cggauuccaaccaaccaauggggucggauaccagccauauaggguuguuguccugucauucgaacuucuccacgcaccag
ccaccguauguggacccaagaagucuacuaaucuggugaagaacaaaugcgucaauuucaacuuuaauggguugaccgg
cacuggggugcugacugaauccaacaagaaguuucugccguuccaacaauucggacgcgauaucgcugauacaaccgaug
ccguuagagauccccaaacauuggagauucuggauauuacgccuuguucauucggugguguuuccgugauuaccccugg
caccaauacgaguaaccaaguggcggugcuguaucaagaugugaacuguacugaagugccgguggcuauacaugccgac
caacucacaccaacauggagaguauauagcacggguuccaauguguuucaaacuagggcuggcuguuugauuggcgcug
aacauguuaauaauuccuaugaaugcgauauucccaucggugccgggauuugcgcaaguuaucaaacgcaaacuaacucc
cccgggucagcauccucugucgcuucccaaucaaucaucgccuauaccaugagucuuggggcagaaaauuccguugcuu
auucuaacaauuccauugcaauuccuacgaacuucaccaucucaguuacuacagaaauacuucccgugucaaugacgaag
acauccguagauugcacaauguauauauguggggacucaacugaaugcucaaaccugcuccugcaauacggaucauuuu
gcacccaacugaacagagcauugaccgguauagccguggagcaagauaagaacacucaagaaguauucgcccaggucaaa
caaaucuauaaaacuccgccuauaaaagauuuuggcggcuuuaacuuuucccaaauacugccugacccaaguaagcccuc
aaaacguagcuuuauagaggaccucuuguuuaauaaggugacacucgcugacgcuggauucauuaagcaauauggugac
ugcuugggagauauugccgcccgcgaucucauuugugcacaaaaguucaacggccucacaguccugcccccucugcuga
cggaugaaaugaucgcucaauacaccucagcucuccuggcaggcaccauaacaagcggguggacauuuggugccggggc
agcacugcaaaucccauucgcaaugcaaauggcuuauagguucaaugggaucggcguaacucaaaauguccucuacgaga
accagaaacucauagcuaaccaauucaauucugcaaucgggaaaauccaggacucccugagcucaacggccagcgcacug
ggcaagcuccaagauguggucaaccaaaacgcacaagcacugaauacucuugugaaacaacucagcuccaauuucggggc
aauaucaaguguccucaaugauauucuuagcaggcuugauccacccgaagccgaggugcagaucgacaggcucauaacag
gcaggcuccagucccuucaaacguauguaacucagcaacugauucgggcugccgagauucgagcuucagcuaauuuggc
agcuacgaagaugagcgaaugcguccugggacagucuaaaagaguagacuuuugcggcaaaggguaucaucugaugagc
uucccacaaagugcuccacauggcgugguuuuccugcaugucacuuauguucccgcacaagagaagaacuucacuaccgc
accagcgaucugucacgaugguaaagcacauuucccgcgggaaggcguauucguaucuaacggcacccacugguucguu
acucaacgcaacuuuuaugaaccacaaaucauuacaaccgauaacacuuuuguuucaggcaauugcgauguugucaucgg
cauugugaauaacacuguguacgauccacuucaaccagaauuggacagcuuuaaagaggagcuugauaaguauuucaag
aaucauaccucucccgacguggaccucggggacaucucuggaauaaaugcuagcgucguuaauauacagaaagagauuga
ucgucugaacgaaguggcuaagaaucugaaugaaagccuuaucgaucugcaagaacuggggaaguacgaacagggauac
auaccggaagccccacgcgacggucaggcuuauguuaggaaggauggagaauggguuuugcucuccacguuucucgggc
uugaaguuuuguuccaaggaccuggucacacccccaauuugagaaacaccaucaccaccaucaccaccacugauaa
(SEQ ID NO: 96)
MDWTWILFLVAAATRVHSSQCVNLTTRTQLPPAYTNSFTRGVYYPDKVFRSSVLHS
TQDLFLPFFSNVTWFHAIHVSGTNGTKRFDNPVLPFNDGVYFASTEKSNIIRGWIFGT
TLDSKTQSLLIVNNATNVVIKVCEFQFCNDPFLGVYYHKNNKSWMESEFRVYSSAN
NCTFEYVSQPFLMDLEGKQGNFKNLREFVFKNIDGYFKIYSKHTPINLVRDLPQGFSA
LEPLVDLPIGINITRFQTLLALHRSYLTPGDSSSGWTAGAAAYYVGYLQPRTFLLKYN
ENGTITDAVDCALDPLSETKCTLKSFTVEKGIYQTSNFRVQPTESIVRFPNITNLCPFGE
VFNATRFASVYAWNRKRISNCVADYSVLYNSASFSTFKCYGVSPTKLNDLCFTNVY
ADSFVIRGDEVRQIAPGQTGKIADYNYKLPDDFTGCVIAWNSNNLDSKVGGNYNYL
YRLFRKSNLKPFERDISTEIYQAGSTPCNGVEGFNCYFPLQSYGFQPTNGVGYQPYRV
VVLSFELLHAPATVCGPKKSTNLVKNKCVNFNFNGLTGTGVLTESNKKFLPFQQFGR
DIADTTDAVRDPQTLEILDITPCSFGGVSVITPGTNTSNQVAVLYQDVNCTEVPVAIH

[chemical structure]

[chemical structure]

GDSTECSNLLLQYGSFCTQLNRALTGIAVEQDKNTQEVFAQVKQIYKTPPIKDFGGFN
FSQILPDPSKPSKRSFIEDLLFNKVTLADAGFIKQYGDCLGDIAARDLICAQKFNGLTV
LPPLLTDEMIAQYTSALLAGTITSGWTFGAGAALQIPFAMQMAYRFNGIGVTQNVLY
ENQKLIANQFNSAIGKIQDSLSSTASALGKLQDVVNQNAQALNTLVKQLSSNFGAISS

[chemical structure]

GQSKRVDFCGKGYHLMSFPQSAPHGVVFLHVTYVPAQEKNFTTAPAICHDGKAHFP
REGVFVSNGTHWFVTQRNFYEPQIITTDNTFVSGNCDVVIGIVNNTVYDPLQPELDSF
KEELDKYFKNHTSPDVDLGDISGINASVVNIQKEIDRLNEVAKNLNESLIDLQELGKY
EQGYIPEAPRDGQAYVRKDGEWVLLSTFLGLEVLFQGPWSHPQFEKHHHHHHHH**
(SEQ ID NO: 97)
WuS_IgE_DownDS2_2P_pVax
gccaccatggactggacctggatactctttctcgtagcagcagccacacgagtgcattcatcacagtgcgttaatctgaccacccgtac
acaactcccacccgcatacacaaatagctttacacgcggagtgtattaccccgataaagtctttcggagctcagtgctccattctactcaa
gatcttttcctgccgttctttagtaacgttacttggtttcatgcaatacatgtgtctggcacaaacggaaccaaacgttttgataatccggtgtt
gccatttaatgatggtgtatattttgcttccacggaaaagtcaaacatcatccgtgggtggatctttggcaccactcttgatagcaaatgtca
aagccttctgattgttaataacgctacaaacgtcgtaattaaagtgtgtgaattccagttctgtaatgaccccttcctcggagtatattacca
caagaataacaaatcttggatggagagcgaatttagagtttacagttcagccaataactgtacatttgaatatgtcagtcagcctttcctcat
ggacctcgaaggtaaacaaggtaattttaagaacttgagagagttcgtgtttaagaacatcgatggctatttcaaaatttactctaagcaca
caccaatcaacctggttcgagacctgccccagggtttctcagctttggaaccattggtggacctgccaatcggcattaacattaccagat
ttcaaactttgttggcactccaccggtcatatcttacccccggagacagttcctcaggctggacggcaggcgccgccgcgtactatgttg
ggtatctccaaccccgaaccttccttctcaaatacaatgaaaacgggacgattacagatgcagtcgattgcgccctggaccccttgtcc
gaaactaaatgcactctgaagagtttcacggtagagaagggaatctatcaaacgagcaattttcgagtccaaccaacggaatctattgtg
cggtttcccaatatcacaaacctctgtccattcggagaagtctttaatgctaccaggtttgcgtctgtatatgcatggaaccgaaagagga
tttccaattgcgtagcggactacagtgtcctttataacagcgcttcattttccacgtttaagtgttatggtgtttctccaacgaaactcaacga
cctctgttttactaacgtttacgctgacagctttgttatacgtggggacgaagtcaggcaaattgctcctggacagactggaaagatcgct
gattataattataaacttcctgacgatttcaccggctgcgttattgcatggaactccaacaatctggattcaaaagtgggtggaaattataat
tatctgtataggttgtttcggaagagcaatcttaagccctttgagcgggacatatgtaccgaaatttaccaagcaggctccaccccatgca
atggagtagaagggttcaattgctattttcctctgcaaagttatggctttcaacccaccaacggagttgggtatcaaccttacagggttgtc
gtgctgagtttcgaattgctccacgcacccgctacagtatgtggccccaagaagtccactaatcttgttaagaataaatgcgtgaacttca
acttcaatggacttacaggtactggagtactcacggaatcaaacaagaaatttctcccatttcaacagtttggccgagatatagctgacac
cacagatgctgttcgcgacccccagacgttggaaatacttgatatcactccctgcagcttcggcggcgtgagcgtgatcactccaggta
ctaatacgagcaatcaagttgccgttctgtaccaagatgtgaactgcaccgaggttccagtggcaattcacgccgaccaacttactccc
acctggcgggtctattccaccggatcaaacgtcttccaaactcgcgctggttgccttatcggtgcagagcacgttaataattcctatgaat
gtgacattcccataggagcaggcatctgtgcatcttatcaaacccagactaattcccctggttccgcttcctctgttgcatcccagtccata
attgcctacactatgagtctcggggctgaaaattccgtggcctattctaataattcaatcgccatcccaaccaattttaccatatccgtaacg
actgaaatacttcctgtcagtatgaccaagacctcagtggactgcaccatgtacatctgcggcgattctactgaatgttccaatctgctttt
gcaatatggttcattctgcacccaactcaacagggctcttacagggatcgccgtcgaacaggataagaatacccaggaagtgttcgcc
caagttaagcaaatttacaagacaccacccatcaaggacttcgggggttcaacttcagccaaattctgcccgacccgtctaagccttct
aagcgctctttcattgaggatcttttgttcaataaggttacgcttgccgatgcagggtttatcaaacagtatggcgactgtcttggggatatc
gcagctagggatcttatttgtgcacagaaatttaatggcctgactgttcttccccctttgctcactgacgagatgattgcccagtacacttca
gctctcctggccgggactataacttctggttggaccttcggagctggcgccgccctgcaaattccatttgcaatgcagatggcttatcgct
tcaacggaattggggtgacccaaaatgttctctacgagaaccagaaactcattgcaaaccagttcaattctgcgatcgggaagatccag
gattccctgtctagtacggctagtgccctcggtaagctccaagacgtcgtcaaccaaaacgcccaggccttgaacacccttgtcaaaca
actgagctccaattttggggctattagcagtgtgctgaatgatatcctgtcccgccttgacccaccggaagcggaagtccaaattgatcg
actgatcactgggcgtctccaatcccttcaaacttacgtgacccaacaactcatccgagcagctgagattagggctagcgctaaccttg
ctgctactaagatgtcagagtgtgtcctcggccagtctaagagagtggacttttgtgggaaagggtaccacttgatgtcattcccacaaa
gcgccccacacggcgtggtgtttctccacgtcacttacgttccagctcaggaaaagaactttaccaccgcccccgctatatgtcatgatg
ggaaggcccactttcctcgtgaaggtgtctttgtcagcaatggcacacactggtttgtgacccaacggaatttctatgagcctcagattatt
accacggataacactttcgtatcagggaattgtgatgtggttatcggcatcgttaataatacagtgtatgacccactgcagccagagcttg
acagcttcaaagaagagctcgataagtactttaagaatcatacaagtcctgacgttgatcttggggatattagtgggattaacgccagcg
tcgtcaatattcagaaagagattgacaggttgaacgaagtagctaagaatcttaatgaaagcctgatagatttgcaagaacttggtaagta
tgagcaggggtacatacccgaggctcctcgggatgggcaggcctatgtacgcaaagacggtgaatgggtattgctcagcacttttctc
ggctgataa (SEQ ID NO: 98)
gccaccauggacuggaccuggauacucuuucucguagcagcagccacacgagugcauucaucacagugcguuaaucugac
cacccguacacaacucccacccgcauacacaaauagcuuuacacgcggaguguauuaccccgauaaagucuuucggagcu
cagugcuccauucuacucaagaucuuuuccugccguucuuuaguaacguuacuugguuucaugcaauacaugugucugg
cacaaacggaaccaaacguuuugauaauccgguguugccauuuaaugaugguguauauuuugcuuccacggaaaaguca
aacaucauccguggguggaucuuuggcaccacucuugauagcaaaugucaaagccuucugauuguuaauaacgcuacaa
acgucguaauuaaagugugugaauuccaguucuguaaugaccccuuccucggaguauauuaccacaagaauaacaaaucu
uggauggagagcgaauuuagaguuuacaguucagccaauaacuguacauuugaauaugucagucagccuuuccucaugg
accucgaagguaaacaagguaauuuuaagaacuugagagaguucguguuuaagaacaucgauggcuauuucaaaauuua
cucuaagcacacaccaaucaaccugguucgagaccugccccaggguuucucagcuuuggaaccauugguggaccugccaa
ucggcauuaacauuaccagauuucaaacuuuguuggcacuccaccggucauaucuuacccccggagacaguuccucaggc
uggacggcaggcgccgcgcguacuauguuggguaucuccaaccccgaaccuuccuucucaaauacaaugaaaacgggac
gauuacagaugcagucgauugcgcccuggaccccuuguccgaaacuaaaugcacucugaagaguuucacgguagagaag
ggaaucuaucaaacgagcaauuuucgaguccaaccaacggaaucuauugugcgguuucccaauaucacaaaccucugucc
auucggagaagucuuuaaugcuaccagguuugcgucuguauaugcauggaaccgaaagaggauuuccaauugcguagcg
gacuacaguguccuuuauaacagcgcuucauuuuccacguuuaaguguuaugguguuucuccaacgaaacucaacgacc
ucuguuuuacuaacguuuacgcugacagcuuuguuauacguggggacgaagucaggcaaauugcuccuggacagacugg
aaagaucgcugauuauaauuauaaacuuccugacgauuucaccggcugcguuauugcauggaacuccaacaaucuggau
ucaaaaguggguggaaauuauaauuaucuguauagguuguuucggaagagcaaucuuaagcccuuugagcgggacauau
guaccgaaauuuaccaagcaggcuccaccccaugcaauggaguagaaggguucaauugcuauuuuccucugcaaaguua
uggcuuucaacccaccaacggaguuggguaucaaccuuacaggguugucgugcugaguuucgaauugcuccacgcaccc
gcuacaguauguggccccaagaaguccacuaaucuuguuaagaauaaaugcgugaacuucaacuucaauggacuuacagg
uacuggaguacucacggaaucaaacaagaaauuucucccauuucaacaguuuggccgagauauagcugacaccacagaug
cuguucgcgacccccagacguuggaaauacuugauaucacucccugcagcuucggcggcgugagcgugaucacuccagg
uacuaauacgagcaaucaaguugccguucuguaccaagaugugaacugcaccgagguuccaguggcaauucacgccgacc
aacuuacucccaccugggggucuauuccaccggaucaaacgucuuccaaacucgcgcugguugccuuaucggugcaga
gcacguuaauaauuccuaugaaugugacauucccauaggagcaggcaucugugcaucuuaucaaacccagacuaauuccc
cugguuccgcuuccucuguugcaucccaguccauaauugccuacacuaugagucucggggcugaaaauuccguggccua
uucuaauaauucaaucgccaucccaaccaauuuuaccauauccguaacgacugaaauacuuccugucaguaugaccaaga
ccucaguggacugcaccauguacaucugcggcgauucuacugaauguuccaaucugcuuuugcaauaugguucauucg
cacccaacucaacagggcucuuacagggaucgccgucgaacaggauaagaauacccaggaaguguucgcccaaguuaagc
aaauuuacaagacaccacccaucaaggacuucggggguucaacuucagccaaauucugcccgacccgucuaagccuucu
aagcgcucuuucauugaggaucuuuuguucaauaagguuacgcuugccgaugcaggguuuaucaaacaguauggcgacu
gucuuggggauaucgcagcuagggaucuuauuugugcacagaaauuuaauggccugacuguucuucccccuuugcucac
ugacgagaugauugcccaguacacuucagcucuccuggccgggacuauaacuucugguuggaccuucggagcuggcgcc
gcccugcaaauuccauuugcaaugcagauggcuuaucgcuucaacggaauuggggugacccaaaauguucucuacgaga
accagaaacucauugcaaaccaguucaauucugcgaucgggaagauccaggauucccugucuaguacggcuagugcccuc
gguaagcuccaagacgucgucaaccaaaacgcccaggccuugaacacccuugucaaacaacugagcuccaauuuuggggc
uauuagcagugugcugaaugauauccugucccgccuugacccaccggaagcggaaguccaaauugaucgacugaucacu
gggcgucuccaaucccuucaaacuuacgugacccaacaacucauccgagcagcugagauuagggcuagcgcuaaccuugc
ugcuacuaagaugucagaguguguccucggccagucuaagagaguggacuuuugugggaaaggguaccacuugauguc
auucccacaaagcgccccacacggcgugguguuucuccacgucacuuacguuccagcucaggaaaagaacuuuaccaccg
cccccgcuauaugucaugaugggaaggcccacuuuccucgugaaggugucuuugucagcaauggcacacacugguuugu
gacccaacggaauuucuaugagccucagauuauuaccacggauaacacuuucguaucagggaauugugaugugguuauc
ggcaucguuaauaauacaguguaugacccacugcagccagagcuugacagcuucaaagaagagcucgauaaguacuuuaa
gaaucauacaaguccugacguugaucuuggggauauuagugggauuaacgccagcgucgucaauauucagaaagagauu
gacagguugaacgaaguagcuaagaaucuuaaugaaagccugauagauuugcaagaacuugguaaguaugagcaggggu
acauacccgaggcuccucgggaugggcaggccuauguacgcaaagacggugaauggguauugcucagcacuuuucucgg
cugauaa (SEQ ID NO: 99)
MDWTWILFLVAAATRVHSSQCVNLTTRTQLPPAYTNSFTRGVYYPDKVFRSSVLHS
TQDLFLPFFSNVTWFHAIHVSGTNGTKRFDNPVLPFNDGVYFASTEKSNIIRGWIFGT

[chemical structure]

NCTFEYVSQPFLMDLEGKQGNFKNLREFVFKNIDGYFKIYSKHTPINLVRDLPQGFSA
LEPLVDLPIGINITRFQTLLALHRSYLTPGDSSSGWTAGAAAYYVGYLQPRTFLLKYN
ENGTITDAVDCALDPLSETKCTLKSFTVEKGIYQTSNFRVQPTESIVRFPNITNLCPFGE
VFNATRFASVYAWNRKRISNCVADYSVLYNSASFSTFKCYGVSPTKLNDLCFTNVY
ADSFVIRGDEVRQIAPGQTGKIADYNYKLPDDFTGCVIAWNSNNLDSKVGGNYNYL

[chemical structure]

VVLSFELLHAPATVCGPKKSTNLVKNKCVNFNFNGLTGTGVLTESNKKFLPFQQFGR
DIADTTDAVRDPQTLEILDITPCSFGGVSVITPGTNTSNQVAVLYQDVNCTEVPVAIH
ADQLTPTWRVYSTGSNVFQTRAGCLIGAEHVNNSYECDIPIGAGICASYQTQTNSPGS
ASSVASQSIIAYTMSLGAENSVAYSNNSIAIPTNFTISVTTEILPVSMTKTSVDCTMYIC
GDSTECSNLLLQYGSFCTQLNRALTGIAVEQDKNTQEVFAQVKQIYKTPPIKDFGGFN
FSQILPDPSKPSKRSFIEDLLFNKVTLADAGFIKQYGDCLGDIAARDLICAQKFNGLTV
LPPLLTDEMIAQYTSALLAGTITSGWTFGAGAALQIPFAMQMAYRFNGIGVTQNVLY
ENQKLIANQFNSAIGKIQDSLSSTASALGKLQDVVNQNAQALNTLVKQLSSNFGAISS

[chemical structure]

GQSKRVDFCGKGYHLMSFPQSAPHGVVFLHVTYVPAQEKNFTTAPAICHDGKAHFP
REGVFVSNGTHWFVTQRNFYEPQIITTDNTFVSGNCDVVIGIVNNTVYDPLQPELDSF
KEELDKYFKNHTSPDVDLGDISGINASVVNIQKEIDRLNEVAKNLNESLIDLQELGKY
EQGYIPEAPRDGQAYVRKDGEWVLLSTFLG** (SEQ ID NO: 100)
WuS_IgE_DownDS1_2P_pVax
gccaccatggactggacctggatactctttctcgtagcagcagccacacgagtgcattcatcccagtgcgtgaacctgaccacccgaa
ctcaactcccaccagcatacaccaactcatttacaagaggagtttattacccggacaaggtatttcgaagttcagttcttcacagcaccca
agacctgtttctgccattcttcagtaatgtcacttggtttcacgcgatacatgtcagcggtacaaacgggacaaagcgattcgataaccca
gtactcccattcaacgacggagtgtattttgcatctacagagaaatccaacattatacgcgggtggatctttggaactactctggactcca
agacacagagcctgctcattgtgaacaatgcaacgaatgtcgtcataaaagtctgtgaatttcaattttgcaacgatcctttcctcggagtc
tattaccataagaacaataagagttggatggagagtgagtttcgcgtctattcttccgcgaacaattgtacatttgaatatgtatcacaacc
ctttcttatggatttggaaggcaaacaaggtaacttcaagaacttgcgcgagttcgtgttcaagaacatagactgttattttaagatctatag
taagcatacgccaatcaatctggtgcgagatttgcctcagggcttttctgctcttgaacccttggttgatctgcccatcgggatcaacataa
ccagatttcaaacgttgctcgcactccaccgcagctatctcactcctggcgattcctcatctgggtggaccgccggagctgctgcttatta
cgtcggctatctccagccgcgtactttcctgctcaagtataatgagaatggcaccattaccgatgctgtggattgtgctcttgatccactct
ctgaaaccaaatgcactctcaagtcttttaccgtggaaaagggtatttatcagacatctaattttcgggtgcaacctactgagtcaattgtac
ggtttcctaacataactaacctttgtccatttggggaagtcttcaatgccacgcggttcgcatcagtctatgcatggaacagaaaacgtatc
tccaactgcgtcgccgattattccgtcctttacaatagcgctagcttttccacattcaaatgttatggcgtatcaccaaccaaacttaacgat
ctctgctttactaatgtctacgctgactctttcgttattcgaggtgacgaggtgcgccaaattgcgcctggtcaaaccggaaagattgccg
attataactacaagctccccgacgactttacgggttgtgtgatcgcctggaatagcaataacctcgattctaaagttggcggtaattataac
tatctgtacagactctttaggaaaagtaatctcaagcccttttgcagggatatctcaaccgaaatctaccaagccggcagcactccttgca
atggtgtcgaggggtttaattgttatttcccactgcaatcttacggctttcaaccgactaatggagtcggttatcaaccctatagggtggtg
gtactctcctttgaacttttgcacgctccggcaacagtttgtggaccaaagaaaagtacgaaccttgttaagaataagtgtgttaatttcaat
tttaacggcctcactggaacaggtgtcctcacagaaagcaacaagaagtttctccctttccaacagtttggacgggatatcgccgacact
actgacgccgtcagagatcctcaaactctcgaaatcttggatatcacaccatgttctttcggtggtgtctccgtcataacaccaggaacta
acacctctaatcaagtggccgtgctctatcaggacgtcaattgcacagaagtgcctgtcgcaatccatgctgatcagctcactcccacct
ggcgtgtgtattccactggctctaatgtctttcagacacgggcaggttgccttattggggcagagcatgtgaacaattcctacgaatgcg
atatacccattggggcaggcatttgcgccagctaccaaacccaaactaacagccccgggagtgccagcagcgtggcatctcagtcca
ttattgcctatacgatgagcctgggtgctgaaaatagcgtggcttatagtaataactctatcgccatacccacaaacttcaccatttcagtg
accaccgaaatccttcctgtttctatgaccaaaacgtccgtcgattgtacaatgtacatttgcggcgatagcactgaatgttcaaacctgct
cctgcaatacggctctttctgtactcagctcaaccgggcactcaccggcatagccgtcgaacaagacaagaatacccaggaagtctttg
cgcaggtgaaacaaatctataagaccccaccaataaaagatttcggcggttttaatttcagccaaatcttgcctgatcccagcaagccat
ctaaacggtctttcattgaagatctcctgttcaacaaggttacgctggctgacgccgggtttattaagcaatatggcgattgccttgggga
cattgccgcacgagacctcatttgtgcccagaaattcaacgggctcaccgtattgcccccgctcctcacagacgaaatgatcgcccaat
atacaagcgccctgcttgcgggaaccattacaagcggttggacctttggtgccggcgcagctctgcaaatacccttcgcaatgcaaat
ggcatatcggtttaatggaattggcgtaacccaaaacgtgctgtatgaaaaccagaaactgatcgcaaatcaattcaatagtgctatagg
aaagatccaagacagtctgtcttccactgctagcgcgctggggaagctccaagacgttgtgaaccaaaacgcgcaggccctgaatac
cctggtgaagcaactttcaagcaatttcggtgctatatcttctgtcctcaatgacattctctctcggctcgatcccccggaagccgaagttc
agatagaccgtttgatcacaggccgcttgcaatccctgcaaacctacgttacacaacaactgattcgcgccgccgaaattcgggcatcc
gccaatctggccgcaaccaaaatgtccgagtgtgttctcggtcaatccaaacgcgtggatttctgcggaaaaggataccatttgatgtca
tttccacaatcagctccacacggtgttgtattcctgcacgtgacctacgtgccagcccaggagaagaattttactactgcgcccgccattt
gtcatgacgggaaggctcattttcctcgggaaggggttttcgtctcaaacggtacccattggttcgtgactcagaggaacttttatgaacc
tcaaatcataacgaccgataacacgtttgtaagtggcaattgcgacgtggtcatcgggattgtaaacaatactgtctatgaccctctccaa
ccagagcttgacagctttaaagaagagcttgataaatactttaagaaccatacctcaccagacgtcgatttgggagatatcagtggcatt
aatgcctctgtcgtcaatatccagaaagagattgaccgcttgaacgaagttgccaagaatcttaatgagtctctgattgacttgcaagaatt
gggaaaatatgaacaaggatatattccagaagcccctcgcgatgggcaagcatatgttcgaaaggatggggaatgggtgctgctcag
cacctttctcggttgataa (SEQ ID NO: 101)
gccaccauggacuggaccuggauacucuuucucguagcagcagccacacgagugcauucaucccagugcgugaaccugac
cacccgaacucaacucccaccagcauacaccaacucauuuacaagaggaguuuauuacccggacaagguauuucgaaguu
caguucuucacagcacccaagaccuguuucugccauucuucaguaaugucacuugguuucacgcgauacaugucagcgg
uacaaacgggacaaagcgauucgauaacccaguacucccauucaacgacggaguguauuuugcaucuacagagaaaucca
acauuauacgcggguggaucuuuggaacuacucuggacuccaagacacagagccugcucauugugaacaaugcaacgaau
gucgucauaaaagucugugaauuucaauuuugcaacgauccuuuccucggagucuauuaccauaagaacaauaagaguu
ggauggagagugaguuucgcgucuauucuuccgcgaacaauuguacauuugaauauguaucacaacccuuucuuaugga
uuuggaaggcaaacaagguaacuucaagaacuugcgcgaguucguguucaagaacauagacuguuauuuuaagaucuau
aguaagcauacgccaaucaaucuggugcgagauuugccucagggcuuuucugcucuugaacccuugguugaucugccca
ucgggaucaacauaaccagauuucaaacguugcucgcacuccaccgcagcuaucucacuccuggcgauuccucaucuggg
uggaccgccggagcugcugcuuauuacgucggcuaucuccagccgcguacuuuccugcucaaguauaaugagaauggca
ccauuaccgaugcuguggauugugcucuugauccacucucugaaaccaaaugcacucucaagucuuuuaccguggaaaa
ggguauuuaucagacaucuaauuuucgggugcaaccuacugagucaauuguacgguuuccuaacauaacuaaccuuugu
ccauuuggggaagucuucaaugccacgcgguucgcaucagucuaugcauggaacagaaaacguaucuccaacugcgucg
ggguauuuaucagacaucuaauuuucgggugcaaccuacugagucaauuguacgguuuccuaacauaacuaaccuuugu
ccauuuggggaagucuucaaugccacgcgguucgcaucagucuaugcauggaacagaaaacguaucuccaacugcgucg
ccgauuauuccguccuuuacaauagcgcuagcuuuuccacauucaaauguuauggcguaucaccaaccaaacuuaacgau
cucugcuuuacuaaugucuacgcugacucuuucguuauucgaggugacgaggugcgccaaauugcgccuggucaaaccg
gaaagauugccgauuauaacuacaagcuccccgacgacuuuacggguugugugaucgccuggaauagcaauaaccucga
uucuaaaguuggcgguaauuauaacuaucuguacagacucuuuaggaaaaguaaucucaagcccuuuugcagggauauc
ucaaccgaaaucuaccaagccggcagcacuccuugcaauggugucgagggguuuaauuguuauuucccacugcaaucuu
acggcuuucaaccgacuaauggagucgguuaucaacccuauaggguggugguacucuccuuugaacuuuugcacgcucc
ggcaacaguuuguggaccaaagaaaaguacgaaccuuguuaagaauaaguguguuaauuucaauuuuaacggccucacu
ggaacagguguccucacagaaagcaacaagaaguuucucccuuuccaacaguuuggacgggauaucgccgacacuacuga
cgccgucagagauccucaaacucucgaaaucuuggauaucacaccauguucuuucgguggugucuccgucauaacaccag
gaacuaacaccucuaaucaaguggccgugcucuaucaggacgucaauugcacagaagugccugucgcaauccaugcugau
cagcucacucccaccuggcguguguauuccacuggcucuaaugucuuucagacacgggcagguugccuuauuggggcag
agcaugugaacaauuccuacgaaugcgauauacccauuggggcaggcauuugcgccagcuaccaaacccaaacuaacagc
cccgggagugccagcagcguggcaucucaguccauuauugccuauacgaugagccugggugcugaaaauagcguggcuu
auaguaauaacucuaucgccauacccacaaacuucaccauuucagugaccaccgaaauccuuccuguuucuaugaccaaaa
cguccgucgauuguacaauguacauuugcggcgauagcacugaauguucaaaccugcuccugcaauacggcucuuucug
uacucagcucaaccgggcacucaccggcauagccgucgaacaagacaagaauacccaggaagucuuugcgcaggugaaac
aaaucuauaagaccccaccaauaaaagauuucggcgguuuuaauuucagccaaaucuugccugaucccagcaagccaucu
aaacggucuuucauugaagaucuccuguucaacaagguuacgcuggcugacgccggguuuauuaagcaauauggcgauu
gccuuggggacauugccgcacgagaccucauuugugcccagaaauucaacgggcucaccguauugcccccgcuccucaca
gacgaaaugaucgcccaauauacaagcgcccugcuugcgggaaccauuacaagcgguuggaccuuuggugccggcgcag
cucugcaaauacccuucgcaaugcaaauggcauaucgguuuaauggaauuggcguaacccaaaacgugcuguaugaaaac
cagaaacugaucgcaaaucaauucaauagugcuauaggaaagauccaagacagucugucuuccacugcuagcgcgcuggg
gaagcuccaagacguugugaaccaaaacgcgcaggcccugaauacccuggugaagcaacuuucaagcaauuucggugcua
uaucuucuguccucaaugacauucucucucggcucgaucccccggaagccgaaguucagauagaccguuugaucacagg
ccgcuugcaaucccugcaaaccuacguuacacaacaacugauucgcgccgccgaaauucgggcauccgccaaucuggccg
caaccaaaauguccgaguguguucucggucaauccaaacgcguggauuucugcggaaaaggauaccauuugaugucauu
uccacaaucagcuccacacgguguuguauuccugcacgugaccuacgugccagcccaggagaagaauuuuacuacugcgc
ccgccauuugucaugacgggaaggcucauuuuccucgggaagggguuuucgucucaaacgguacccauugguucgugac
ucagaggaacuuuuaugaaccucaaaucauaacgaccgauaacacguuuguaaguggcaauugcgacguggucaucggg
auuguaaacaauacugucuaugacccucuccaaccagagcuugacagcuuuaaagaagagcuugauaaauacuuuaagaa
ccauaccucaccagacgucgauuugggagauaucaguggcauuaaugccucugucgucaauauccagaaagagauugacc
gcuugaacgaaguugccaagaaucuuaaugagucucugauugacuugcaagaauugggaaaauaugaacaaggauauau
uccagaagccccucgcgaugggcaagcauauguucgaaaggauggggaaugggugcugcucagcaccuuucucgguuga
uaa (SEQ ID NO: 102)
MDWTWILFLVAAATRVHSSQCVNLTTRTQLPPAYTNSFTRGVYYPDKVFRSSVLHS
TQDLFLPFFSNVTWFHAIHVSGTNGTKRFDNPVLPFNDGVYFASTEKSNIIRGWIFGT
TLDSKTQSLLIVNNATNVVIKVCEFQFCNDPFLGVYYHKNNKSWMESEFRVYSSAN

[chemical structure]

LEPLVDLPIGINITRFQTLLALHRSYLTPGDSSSGWTAGAAAYYVGYLQPRTFLLKYN
ENGTITDAVDCALDPLSETKCTLKSFTVEKGIYQTSNFRVQPTESIVRFPNITNLCPFGE
VFNATRFASVYAWNRKRISNCVADYSVLYNSASFSTFKCYGVSPTKLNDLCFTNVY
ADSFVIRGDEVRQIAPGQTGKIADYNYKLPDDFTGCVIAWNSNNLDSKVGGNYNYL
YRLFRKSNLKPFCRDISTEIYQAGSTPCNGVEGFNCYFPLQSYGFQPTNGVGYQPYRV
VVLSFELLHAPATVCGPKKSTNLVKNKCVNFNFNGLTGTGVLTESNKKFLPFQQFGR
DIADTTDAVRDPQTLEILDITPCSFGGVSVITPGTNTSNQVAVLYQDVNCTEVPVAIH
ADQLTPTWRVYSTGSNVFQTRAGCLIGAEHVNNSYECDIPIGAGICASYQTQTNSPGS
ASSVASQSIIAYTMSLGAENSVAYSNNSIAIPTNFTISVTTEILPVSMTKTSVDCTMYIC
GDSTECSNLLLQYGSFCTQLNRALTGIAVEQDKNTQEVFAQVKQIYKTPPIKDFGGFN
FSQILPDPSKPSKRSFIEDLLFNKVTLADAGFIKQYGDCLGDIAARDLICAQKFNGLTV
LPPLLTDEMIAQYTSALLAGTITSGWTFGAGAALQIPFAMQMAYRENGIGVTQNVLY
ENQKLIANQFNSAIGKIQDSLSSTASALGKLQDVVNQNAQALNTLVKQLSSNFGAISS
VLNDILSRLDPPEAEVQIDRLITGRLQSLQTYVTQQLIRAAEIRASANLAATKMSECVL
GQSKRVDFCGKGYHLMSFPQSAPHGVVFLHVTYVPAQEKNFTTAPAICHDGKAHFP
REGVFVSNGTHWFVTQRNFYEPQIITTDNTFVSGNCDVVIGIVNNTVYDPLQPELDSF
KEELDKYFKNHTSPDVDLGDISGINASVVNIQKEIDRLNEVAKNLNESLIDLQELGKY
EQGYIPEAPRDGQAYVRKDGEWVLLSTFLG** (SEQ ID NO: 103)
WuS_IgE_2P_UpGly_pVax
gccaccatggattggacctggatacttttcctcgtggccgcagcaacaagagtccactcctctcagtgcgttaacctgactactagaacc
caattgcccccggcatacacaaactctttcacccggggtgtctactatcccgacaaagtgtttagaagtagcgtgctgcacagcaccca
agatctctttctgccattcttctcaaacgtcacctggtttcacgccatccatgtaagcgggaccaacggcacaaagcgttttgataaccct
gttttgccattcaatgatggcgtgtattttgcttccactgagaaaagcaacatcattagagggtggatatttggcacaacgcttgactccaa
gacgcagagtcttttgatagtaaacaacgcaactaatgtggtcattaaagtctgtgaatttcaattttgcaatgaccccttccttggagtctat
taccacaagaacaacaaaagctggatggaaagcgaatttagggtctacagctctgccaataactgcacattcgaatacgtcagccaac
cattcttgatggacctggaaggcaagcaaggaaactttaagaatctgagggaatttgtgtttaagaatatcgacggatattttaagatctat
tccaagcatactcccattaatctcgttcgtgaccttcctcagggtttctctgcattggaacccctcgtagatttgcccattgggattaatatca
ctagattccagacgctgcttgcactccatcgatcttatctgacccctggtgactcctcttccgggtggacggcgggtgctgcagcctact
acgttggctatttgcaacctaggacctttctgttgaagtataatgagaatgggactattactgatgccgttgattgcgccctcgatccgctgt
cagaaacaaagtgcaccctgaagagcttcacagtagaaaagggaatctatcaaacctcaaatttccgcgttcaaccaactgaatcaatc
gtgcgttttcctaacatcacaaatctgtgtccgtttggagaagtatttaatgcgacgcgtttcgcaagcgtctacgcgtggaatcgcaaac
gtatctctaattgcgtagcagattattctgtgctgtacaatagcgcatctttctcaacgtttaagtgctacggcgttaatgggaccaagctga
atgatctctgtttcactaatgtgtacgcagacagttttgtaattagaggagacgaggttaggcaaatagcaccgggtcaaactggcaaaa
tcgccgactataactacaagctccctgatgacttcacgggctgcgtaattgcttggaactctaataacctggactctaaagtcggcggga
attataattatctctatcggttgtttcgaaaatccaatctcaaaccctttgagcgggacatcaatactacaatttatcaagctggtagtactcct
tgcaatggggtagaaggcttcaattgttatttcccccttcaatcttacggatttcaacccacgaacggcgtagggtaccagccctatcgag
tggtggtactgtcattcgaacttaatcacgccccagcaacagtctgcgggcctaagaaaagcacgaatcttgtcaagaataagtgtgta
aatttcaacttcaatggtcttacaggcacgggagtgctcactgagtctaataagaaatttcttcctttccaacaattcggtcgtgatattgcc
gatactactgatgcagtccgagatccacaaactctcgaaatcctcgatattactccttgtagttttggcggcgtctccgtgatcaccccag
ggaccaacactagtaaccaagtggcggtgctctaccaagatgttaactgcacagaagtcccggtagcgatccatgccgaccagctca
ctcccacatggcgtgtttacagcacagggtcaaacgttttccagacccgtgccggatgtcttataggagccgaacacgtaaataacagt
tatgaatgcgatatcccaattggtgcaggtatctgtgcgtcatatcaaacccaaactaattctccggggtccgcctcaagcgttgcctcac
aatcaataatcgcctacacaatgtccctcggtgccgaaaattcagtcgcttactctaacaatagcattgctatccctaccaacttcactattt
ctgttaccacggaaattttgcctgtatccatgaccaaaacatctgttgattgcacgatgtacatctgcggggattctaccgaatgttctaac
ctgcttctgcaatacggctccttctgcacccaattgaaccgcgcactgactgggattgctgtggaacaagacaagaatactcaagaagt
atttgcccaggtcaaacagatttacaaaactcccccaattaaagatttcggcggtttcaattttagtcaaattctgccagatccaagtaagc
catccaaacgctcatttattgaggacctgctctttaataaagtcacgctggccgacgccggcttcataaaacagtatggcgattgtcttgg
agacatcgccgcccgcgacctcatttgcgcacaaaagttcaatgggctcaccgtgttgccaccactgctcacagatgagatgatcgca
cagtacacgagcgcccttcttgccggcactatcacgtctggttggacgttcggtgccggagccgctctgcaaattccctttgcaatgcaa
atggcctatagatttaatggaattggcgtaacacagaacgtgttgtacgagaaccagaagctcattgccaaccagttcaattccgctattg
gcaaaatacaagactctctcagctcaactgctagcgcactgggaaaattgcaagacgtagtcaatcaaaatgcccaagccctcaatact
ctcgtcaaacagttgtcttccaactttggggctatcagtagtgtactcaatgacattctttcaagactggacccgcccgaggcggaagtcc
aaattgatcgtctgataactggaaggttgcaaagccttcagacctacgttacgcaacaacttattagggctgccgaaataagggcatcc
gctaatctggcagctacaaagatgtctgaatgtgttttgggacagagcaaacgggttgacttctgcggtaaaggttaccatctcatgtcttt
tccacaaagcgcaccgcacggagtcgtcttcctgcatgtaacatacgtcccagcccaagaaaagaattttaccacagccccagccatc
tgccacgacggcaaggcgcatttcccaagggaaggcgtgtttgtatccaacgggacgcattggtttgtcactcaaaggaacttttacga
accccaaattattaccactgataacaccttcgtttctgggaactgtgatgtcgtgattgggatagtaaacaacacggtatatgatccactgc
aaccagaactggattccttcaaagaagagctggacaaatacttcaagaatcatactagtcctgacgtcgacctgggcgatatcagtgga
atcaacgctagcgtcgtaaacattcaaaaggagatcgatagacttaacgaggtcgccaagaatctcaatgaaagcctcatcgatttgca
agaactcggaaaatatgagcaaagcggatcagggtacattccggaagcccccagggacggacaggcatatgtccgcaaggacgga
gaatgggttcttcttagcacttttctggggtaatga (SEQ ID NO: 104)
gccaccauggauuggaccuggauacuuuuccucguggccgcagcaacaagaguccacuccucucagugcguuaaccugac
uacuagaacccaauugcccccggcauacacaaacucuuucacccggggugucuacuaucccgacaaaguguuuagaagua
gcgugcugcacagcacccaagaucucuuucugccauucuucucaaacgucaccugguuucacgccauccauguaagcggg
accaacggcacaaagcguuuugauaacccuguuuugccauucaaugauggcguguauuuugcuuccacugagaaaagca
acaucauuagaggguggauauuuggcacaacgcuugacuccaagacgcagagucuuuugauaguaaacaacgcaacuaau
guggucauuaaagucugugaauuucaauuuugcaaugaccccuuccuuggagucuauuaccacaagaacaacaaaagcu
ggauggaaagcgaauuuagggucuacagcucugccaauaacugcacauucgaauacgucagccaaccauucuugauggac
cuggaaggcaagcaaggaaacuuuaagaaucugagggaauuuguguuuaagaauaucgacggauauuuuaagaucuauu
ccaagcauacucccauuaaucucguucgugaccuuccucaggguuucucugcauuggaaccccucguagauuugcccau
ugggauuaauaucacuagauuccagacgcugcuugcacuccaucgaucuuaucugaccccuggugacuccucuuccggg
uggacggcgggugcugcagccuacuacguuggcuauuugcaaccuaggaccuuucuguugaaguauaaugagaauggg
acuauuacugaugccguugauugcgcccucgauccgcugucagaaacaaagugcacccugaagagcuucacaguagaaaa
gggaaucuaucaaaccucaaauuuccgcguucaaccaacugaaucaaucgugcguuuuccuaacaucacaaaucuguguc
cguuuggagaaguauuuaaugcgacgcguuucgcaagcgucuacgcguggaaucgcaaacguaucucuaauugcguagc
agauuauucugugcuguacaauagcgcaucuuucucaacguuuaagugcuacggcguuaaugggaccaagcugaaugau
cucuguuucacuaauguguacgcagacaguuuuguaauuagaggagacgagguuaggcaaauagcaccgggucaaacug
gcaaaaucgccgacuauaacuacaagcucccugaugacuucacgggcugcguaauugcuuggaacucuaauaaccuggac
ucuaaagucggcgggaauuauaauuaucucuaucgguuguuucgaaaauccaaucucaaacccuuugagcgggacauca
auacuacaauuuaucaagcugguaguacuccuugcaaugggguagaaggcuucaauuguuauuucccccuucaaucuua
cggauuucaacccacgaacggcguaggguaccagcccuaucgaguggugguacugucauucgaacuuaaucacgccccag
caacagucugcgggccuaagaaaagcacgaaucuugucaagaauaaguguguaaauuucaacuucaauggucuuacaggc
acgggagugcucacugagucuaauaagaaauuucuuccuuuccaacaauucggucgugauauugccgauacuacugaug
caguccgagauccacaaacucucgaaauccucgauauuacuccuuguaguuuuggggcgucuccgugaucaccccagg
gaccaacacuaguaaccaaguggcggugcucuaccaagauguuaacugcacagaagucccgguagcgauccaugccgacc
agcucacucccacauggcguguuuacagcacagggucaaacguuuuccagacccgugccggaugucuuauaggagccga
acacguaaauaacaguuaugaaugcgauaucccaauuggugcagguaucugugcgucauaucaaacccaaacuaauucuc
cgggguccgccucaagcguugccucacaaucaauaaucgccuacacaaugucccucggugccgaaaauucagucgcuuac
ucuaacaauagcauugcuaucccuaccaacuucacuauuucuguuaccacggaaauuuugccuguauccaugaccaaaac
aucuguugauugcacgauguacaucugcggggauucuaccgaauguucuaaccugcuucugcaauacggcuccuucugc
acccaauugaaccgcgcacugacugggauugcuguggaacaagacaagaauacucaagaaguauuugcccaggucaaaca
gauuuacaaaacucccccaauuaaagauuucggcgguuucaauuuuagucaaauucugccagauccaaguaagccaucca
aacgcucauuuauugaggaccugcucuuuaauaaagucacgcuggccgacgccggcuucauaaaacaguauggcgauug
ucuuggagacaucgccgcccgcgaccucauuugcgcacaaaaguucaaugggcucaccguguugccaccacugcucacag
augagaugaucgcacaguacacgagcgcccuucuugccggcacuaucacgucugguuggacguucggugccggagccgc
ucugcaaauucccuuugcaaugcaaauggccuauagauuuaauggaauuggcguaacacagaacguguuguacgagaac
cagaagcucauugccaaccaguucaauuccgcuauuggcaaaauacaagacucucucagcucaacugcuagcgcacuggg
aaaauugcaagacguagucaaucaaaaugcccaagcccucaauacucucgucaaacaguugucuuccaacuuuggggcua
ucaguaguguacucaaugacauucuuucaagacuggaccccccgaggcggaaguccaaauugaucgucugauaacugg
aagguugcaaagccuucagaccuacguuacgcaacaacuuauuagggcugccgaaauaagggcauccgcuaaucuggcag
cuacaaagaugucugaauguguuuugggacagagcaaacggguugacuucugcgguaaagguuaccaucucaugucuuu
uccacaaagcgcaccgcacggagucgucuuccugcauguaacauacgucccagcccaagaaaagaauuuuaccacagcccc
agccaucugccacgacggcaaggcgcauuucccaagggaaggcguguuuguauccaacgggacgcauugguuugucacu
caaaggaacuuuuacgaaccccaaauuauuaccacugauaacaccuucguuucugggaacugugaugucgugauuggga
uaguaaacaacacgguauaugauccacugcaaccagaacuggauuccuucaaagaagagcuggacaaauacuucaagaau
cauacuaguccugacgucgaccugggcgauaucaguggaaucaacgcuagcgucguaaacauucaaaaggagaucgauag
acuuaacgaggucgccaagaaucucaaugaaagccucaucgauuugcaagaacucggaaaauaugagcaaagcggaucag
gguacauuccggaagcccccagggacggacaggcauauguccgcaaggacggagaauggguucuucuuagcacuuuucu
gggguaauga (SEQ ID NO: 105)
MDWTWILFLVAAATRVHSSQCVNLTTRTQLPPAYTNSFTRGVYYPDKVFRSSVLHS
TQDLFLPFFSNVTWFHAIHVSGTNGTKRFDNPVLPFNDGVYFASTEKSNIIRGWIFGT
TLDSKTQSLLIVNNATNVVIKVCEFQFCNDPFLGVYYHKNNKSWMESEFRVYSSAN
NCTFEYVSQPFLMDLEGKQGNFKNLREFVFKNIDGYFKIYSKHTPINLVRDLPQGFSA
LEPLVDLPIGINITRFQTLLALHRSYLTPGDSSSGWTAGAAAYYVGYLQPRTFLLKYN
ENGTITDAVDCALDPLSETKCTLKSFTVEKGIYQTSNFRVQPTESIVRFPNITNLCPFGE

[chemical structure]

ADSFVIRGDEVRQIAPGQTGKIADYNYKLPDDFTGCVIAWNSNNLDSKVGGNYNYL

[chemical structure]

[chemical structure]

DIADTTDAVRDPQTLEILDITPCSFGGVSVITPGTNTSNQVAVLYQDVNCTEVPVAIH
ADQLTPTWRVYSTGSNVFQTRAGCLIGAEHVNNSYECDIPIGAGICASYQTQTNSPGS
ASSVASQSIIAYTMSLGAENSVAYSNNSIAIPTNFTISVTTEILPVSMTKTSVDCTMYIC
GDSTECSNLLLQYGSFCTQLNRALTGIAVEQDKNTQEVFAQVKQIYKTPPIKDFGGFN
FSQILPDPSKPSKRSFIEDLLFNKVTLADAGFIKQYGDCLGDIAARDLICAQKFNGLTV
LPPLLTDEMIAQYTSALLAGTITSGWTFGAGAALQIPFAMQMAYRFNGIGVTQNVLY
ENQKLIANQFNSAIGKIQDSLSSTASALGKLQDVVNQNAQALNTLVKQLSSNFGAISS

[chemical structure]

GQSKRVDFCGKGYHLMSFPQSAPHGVVFLHVTYVPAQEKNFTTAPAICHDGKAHFP
REGVFVSNGTHWFVTQRNFYEPQIITTDNTFVSGNCDVVIGIVNNTVYDPLQPELDSF
KEELDKYFKNHTSPDVDLGDISGINASVVNIQKEIDRLNEVAKNLNESLIDLQELGKY
EQSGSGYIPEAPRDGQAYVRKDGEWVLLSTFLG** (SEQ ID NO: 106)
WuS_DownDS3_D2P_Furin_pVax
gccaccatggactggacctggatactctttctcgtagcagcagccacacgagtgcattcaatgttcgttttcctcgtgctcttgcctttggtt
tcttctcagtgcgtaaacctcacgactcgaacccaactgcccccagcttatacaaattcctttacgcggggcgtctattacccggataag
gttttcagatccagcgtgctgcatagtacacaagatctctttcttcctttcttctcaaatgtaacctggtttcacgctattcatgtatccggcac
caatggaactaaaagatttgataacccggtgttgcccttcaatgatggtgtgtatttcgcttccacggaaaagtcaaacatcatcagaggg
tggatattcggcacaacattggattccaagtgccagtcactcctcatagtgaacaatgctactaacgtggttataaaggtctgcgaatttca
attttgtaatgatcctttcctcggtgtttactatcacaagaacaataagtcctggatggaatcagaattccgtgtatacagttctgcgaacaat
tgcacattcgaatatgtgtcccaaccctttctcatggatctggaagggaagcagggtaactttaagaatctgagagaattcgtgttcaaga
acattgactgctattttaaaatctatagcaaacacacccctataaacttggtacgggatttgcctcaaggattctcagcactcgaacccttg
gtcgatttgccaatcggcatcaatatcacccggtttcagacactcctggctcttcaccgctcctacttgacacctggtgattcctcatctggt
tggaccgccggcgcagcggcatactatgtcggctatcttcaaccaagaaccttcttgctgaaatataatgagaacggaactataactgat
gccgttgattgtgcccttgatccacttagcgaaacaaagtgcactctgaagtccttcacagttgaaaaggggatctaccaaacatccaac
ttccgggtacaacctactgagtccatagtgcgatttcctaacattaccaatctgtgcccatttggagaagtattcaacgcaactaggttcgc
gtccgtttacgcgtggaacaggaaaaggatttccaattgcgtcgccgactatagcgttctctataacagcgcctcatttagcacgtttaag
tgttacggggttagtccgaccaaactcaatgacttgtgttttaccaatgtctatgcagactcctttgttattagaggcgacgaggtcagaca
aattgcccccggacagacaggtaagattgcagattataattataaactgccggacgacttcacggggtgtgttattgcatggaactccaa
taacctggactctaaagtaggcgggaactataactatctgtatcgcctgtttcgcaaatctaacctgaaacccttctgcagggacatatgt
actgaaatatatcaagctggcagcacaccttgtaatggcgtcgagggattcaattgttacttcccacttcaatcttacggttttcagcctact
aacggcgtagggtatcaaccctatagagttgtagtgctctctttcgaattgctccatgcccccgcgactgtttgtggacctaagaagtcca
cgaacctggtaaagaacaagtgtgttaattttaattttaatggactgaccgggactggagtgctgactgaaagtaacaagaaatttctgcc
tttccaacaatttggccgcgatatcgctgataccaccgacgccgtcagagatccgcagactctcgaaatcctggacatcacgccctgct
cattcggcggggttagcgttattactccaggcactaacactagcaatcaagttgcagttctgtaccaggatgtgaactgtaccgaagtcc
ccgtcgccattcatgccgatcagctgaccccgacttggcgggtatattcaaccggcagcaatgtctttcaaacaagggcgggttgtctc
atcggagcggagcatgtaaataatagttatgaatgcgacatccccattggcgcggggatctgtgcttcatatcaaactcaaaccaattcc
ccacggcggagacgatcagtagccagtcaatcaataattgcgtatacgatgagtcttggggcagaaaatagcgtggcttattctaataat
agcatcgctatacctacaaattttacaatcagtgtaactaccgaaatccttcctgtcagcatgaccaaaactagcgtagattgcacgatgt
atatttgcggagactcaactgagtgcagtaacctgttgttgcaatacggaagtttctgtacccagctgaaccgcgctcttacgggcattgc
agtagaacaagataagaatacccaagaagtgtttgcccaggtgaaacaaatctacaagactcccccgattaaagactttggcgggttca
acttcagccagatattgcccgacccgtctcgtcgtagacggtcctttattgaagacctgctcttcaacaaggtcacactggctgatgcag
gttttattaagcaatacggcgactgtcttggcgacatcgccgctagggaccttatatgtgctcagaaattcaatggtctgacagttctgcca
cccttgctcactgacgaaatgatcgctcaatatacaagcgccttgctggctgggactattacttccggatggacattcggggcgggtgc
cgccttgcaaattccttttgcaatgcaaatggcataccgtttcaacggaatcggcgtaacccagaatgtgctctatgaaaaccagaaattg
atagcaaatcaatttaactcagccataggaaagattcaagactctctcagctcaaccgcgagtgctctcggcaagctccaagacgtagt
aaatcaaaatgcacaagctttgaacactttggtaaagcaattgtcttccaacttcggggcgatctcatctggccctaacgacatcctgtcc
cggttgcccaaagtggaagccgaggtgcagatcgaccgcctcatcaccggccgacttcaatcactccaaacctacgtgactcaacaa
ctgatccgggcagccgagataagggcgagtgcaaacttggcagctacgaaaatgtcagaatgtgttctcggccagagtaaacgggta
gacttttgtgggaaaggttatcacttgatgtctttccctcaaagcgctcctcacggcgtcgtcttcttgcatgtgacttacgtgccagctcaa
gaaaagaacttcaccaccgcccctgctatatgccatgacggtaaagctcacttcccccgagagggcgtgttcgttagtaatggaaccc
attggtttgtgactcaacgaaacttttatgaacctcaaataattaccacggataacacttttgttagtggtaattgtgacgtggtgatcggcat
tgtgaataacacagtctacgatcctctgcaaccagaactggacagctttaaagaggaacttgacaaatatttcaagaaccatacaagcc
ccgacgtcgacctgggcgacatcagtggaatcaatgcgtccgtagtcaatatccagaaggagattgatcggcttaatgaagtcgctaa
gaatttgaatgaaagtcttatagatctgcaagaactcgggaagtacgagcaatatattaaatggccttggtccggacgtagaaggcgca
ggcggggctcaggcggttcagggtcagggtatattcccgaggcgccacgcgatgggcaagcgtacgtgcgtaaagatggcgaatg
ggtgttgctttccacattcttggggtgataa (SEQ ID NO: 107)
gccaccauggacuggaccuggauacucuuucucguagcagcagccacacgagugcauucaauguucguuuuccucgugc
ucuugccuuugguuucuucucagugcguaaaccucacgacucgaacccaacugcccccagcuuauacaaauuccuuuacg
cggggcgucuauuacccggauaagguuuucagauccagcgugcugcauaguacacaagaucucuuucuuccuuucuucu
caaauguaaccugguuucacgcuauucauguauccggcaccaauggaacuaaaagauuugauaacccgguguugcccuu
caaugaugguguguauuucgcuuccacggaaaagucaaacaucaucagaggguggauauucggcacaacauuggauucc
aagugccagucacuccucauagugaacaaugcuacuaacgugguuauaaaggucugcgaauuucaauuuuguaaugauc
cuuuccucgguguuuacuaucacaagaacaauaaguccuggauggaaucagaauuccguguauacaguucugcgaacaa
uugcacauucgaauaugugucccaacccuuucucauggaucuggaagggaagcaggguaacuuuaagaaucugagagaa
uucguguucaagaacauugacugcuauuuuaaaaucuauagcaaacacaccccuauaaacuugguacgggauuugccuca
aggauucucagcacucgaacccuuggucgauuugccaaucggcaucaauaucacccgguuucagacacuccuggcucuuc
accgcuccuacuugacaccuggugauuccucaucugguuggaccgccggcgcagcggcauacuaugucggcuaucuuca
accaagaaccuucuugcugaaauauaaugagaacggaacuauaacugaugccguugauugugcccuugauccacuuagc
gaaacaaagugcacucugaaguccuucacaguugaaaaggggaucuaccaaacauccaacuuccggguacaaccuacuga
guccauagugcgauuuccuaacauuaccaaucugugcccauuuggagaaguauucaacgcaacuagguucgcguccguu
uacgcguggaacaggaaaaggauuuccaauugcgucgccgacuauagcguucucuauaacagcgccucauuuagcacgu
uuaaguguuacgggguuaguccgaccaaacucaaugacuuguguuuuaccaaugucuaugcagacuccuuuguuauuag
aggcgacgaggucagacaaauugcccccggacagacagguaagauugcagauuauaauuauaaacugccggacgacuuca
cgggguguguuauugcauggaacuccaauaaccuggacucuaaaguagggggaacuauaacuaucuguaucgccuguu
ucgcaaaucuaaccugaaacccuucugcagggacauauguacugaaauauaucaagcuggcagcacaccuuguaauggcg
ucgagggauucaauuguuacuucccacuucaaucuuacgguuuucagccuacuaacggcguaggguaucaacccuauag
aguuguagugcucucuuucgaauugcuccaugcccccgcgacuguuuguggaccuaagaaguccacgaaccugguaaag
aacaaguguguuaauuuuaauuuuaauggacugaccgggacuggagugcugacugaaaguaacaagaaauuucugccuu
uccaacaauuuggccgcgauaucgcugauaccaccgacgccgucagagauccgcagacucucgaaauccuggacaucacg
cccugcucauucggcgggguuagcguuauuacuccaggcacuaacacuagcaaucaaguugcaguucuguaccaggaug
ugaacuguaccgaaguccccgucgccauucaugccgaucagcugaccccgacuuggcggguauauucaaccggcagcaau
gucuuucaaacaagggggguugucucaucggagcggagcauguaaauaauaguuaugaaugcgacauccccauuggcg
cggggaucugugcuucauaucaaacucaaaccaauuccccacggcggagacgaucaguagccagucaaucaauaauugcg
uauacgaugagucuuggggcagaaaauagcguggcuuauucuaauaauagcaucgcuauaccuacaaauuuuacaauca
guguaacuaccgaaauccuuccugucagcaugaccaaaacuagcguagauugcacgauguauauuugcggagacucaacu
gagugcaguaaccuguuguugcaauacggaaguuucuguacccagcugaaccgcgcucuuacgggcauugcaguagaac
aagauaagaauacccaagaaguguuugcccaggugaaacaaaucuacaagacucccccgauuaaagacuuuggcggguuc
aacuucagccagauauugcccgacccgucucgucguagacgguccuuuauugaagaccugcucuucaacaaggucacacu
ggcugaugcagguuuuauuaagcaauacggcgacugucuuggcgacaucgccgcuagggaccuuauaugugcucagaaa
uucaauggucugacaguucugccacccuugcucacugacgaaaugaucgcucaauauacaagcgccuugcuggcuggga
cuauuacuuccggauggacauucgggggggugccgccuugcaaauuccuuuugcaaugcaaauggcauaccguuucaa
cggaaucggcguaacccagaaugugcucuaugaaaaccagaaauugauagcaaaucaauuuaacucagccauaggaaaga
uucaagacucucucagcucaaccgcgagugcucucggcaagcuccaagacguaguaaaucaaaaugcacaagcuuugaac
acuuugguaaagcaauugucuuccaacuucggggcgaucucaucuggcccuaacgacauccugucccgguugcccaaag
uggaagccgaggugcagaucgaccgccucaucaccggccgacuucaaucacuccaaaccuacgugacucaacaacugauc
cgggcagccgagauaagggcgagugcaaacuuggcagcuacgaaaaugucagaauguguucucggccagaguaaacggg
uagacuuuugugggaaagguuaucacuugaugucuuucccucaaagcgcuccucacggcgucgucuucuugcaugugac
uuacgugccagcucaagaaaagaacuucaccaccgccccugcuauaugccaugacgguaaagcucacuucccccgagagg
gcguguucguuaguaauggaacccauugguuugugacucaacgaaacuuuuaugaaccucaaauaauuaccacggauaa
cacuuuuuuagugguaauugugacguggugaucggcauugugaauaacacagucuacgauccucugcaaccagaacug
gacagcuuuaaagaggaacuugacaaauauuucaagaaccauacaagccccgacgucgaccugggcgacaucaguggaau
caaugcguccguagucaauauccagaaggagauugaucggcuuaaugaagucgcuaagaauuugaaugaaagucuuaua
gaucugcaagaacucgggaaguacgagcaauauauuaaauggccuugguccggacguagaaggcgcaggcggggcucag
gcgguucagggucaggguauauucccgaggcgccacgcgaugggcaagcguacgugcguaaagauggcgaaugggugu
ugcuuuccacauucuuggggugau (SEQ ID NO: 108)
MDWTWILFLVAAATRVHSMFVFLVLLPLVSSQCVNLTTRTQLPPAYTNSFTRGVYY
PDKVFRSSVLHSTQDLFLPFFSNVTWFHAIHVSGTNGTKRFDNPVLPFNDGVYFASTE

[chemical structure]

[chemical structure]

LVRDLPQGFSALEPLVDLPIGINITRFQTLLALHRSYLTPGDSSSGWTAGAAAYYVGY
LQPRTFLLKYNENGTITDAVDCALDPLSETKCTLKSFTVEKGIYQTSNFRVQPTESIVR
FPNITNLCPFGEVFNATRFASVYAWNRKRISNCVADYSVLYNSASFSTFKCYGVSPTK
LNDLCFTNVYADSFVIRGDEVRQIAPGQTGKIADYNYKLPDDFTGCVIAWNSNNLDS

[chemical structure]

NGVGYQPYRVVVLSFELLHAPATVCGPKKSTNLVKNKCVNFNFNGLTGTGVLTESN
KKFLPFQQFGRDIADTTDAVRDPQTLEILDITPCSFGGVSVITPGTNTSNQVAVLYQD
VNCTEVPVAIHADQLTPTWRVYSTGSNVFQTRAGCLIGAEHVNNSYECDIPIGAGICA

[chemical structure]

KTSVDCTMYICGDSTECSNLLLQYGSFCTQLNRALTGIAVEQDKNTQEVFAQVKQIY

[chemical structure]

CAQKFNGLTVLPPLLTDEMIAQYTSALLAGTITSGWTFGAGAALQIPFAMQMAYRFN
GIGVTQNVLYENQKLIANQFNSAIGKIQDSLSSTASALGKLQDVVNQNAQALNTLVK

[chemical structure]

AATKMSECVLGQSKRVDFCGKGYHLMSFPQSAPHGVVFLHVTYVPAQEKNFTTAPA
ICHDGKAHFPREGVFVSNGTHWFVTQRNFYEPQIITTDNTFVSGNCDVVIGIVNNTVY
DPLQPELDSFKEELDKYFKNHTSPDVDLGDISGINASVVNIQKEIDRLNEVAKNLNES
LIDLQELGKYEQYIKWPWSGRRRRRRGSGGSGSGYIPEAPRDGQAYVRKDGEWVLL
STFLG** (SEQ ID NO: 109)
WuS_DownDS3_D2P_F_NoTriCle_pVax
gccaccatggactggacctggatactctttctcgtagcagcagccacacgagtgcattcaatgttcgtgttcctcgtgctcctgcctctcg
ttagcagccaatgtgttaatctcaccaccagaacacagctcccacccgcgtatactaactcttttacgaggggagtttattatcccgataa
ggttttccggtctagcgtactccactccacccaagatctgttcctgcctttctttagcaacgtgacgtggtttcatgcaatccacgtgagtg
gcaccaatggaaccaagcggttcgataatcctgtgttgccgtttaacgatggcgtgtattttgcctcaactgaaaagtctaacataatacg
cggctggatcttcgggaccacattggatagtaagtgtcaatctctgcttatcgtgaacaacgctactaacgtcgttataaaggtctgtgag
ttccaattctgcaacgacccattcctgggtgtgtattaccacaagaataataaatcttggatggagtctgagtttcgcgtatactcttctgcta
acaactgcacctttgaatatgtaagtcaaccattcctcatggatctggaaggaaaacaaggcaactttaagaacttgcgggaatttgtctt
caagaacatcgactgttattttaaaatttactcaaaacacaccccgattaatctggtccgcgatttgccccaagggttctctgcattggaac
cccttgtggacttgcctataggaattaatatcacccgctttcaaactcttctggcgctgcaccgtagctacctgacaccaggagatagctc
tagtggctggactgctggagccgcggcatattatgtggggtatctgcagccacgtacatttctcctcaaatataatgaaaatggtacaata
acggatgcagtcgactgcgcattggaccctctgagtgaaacaaaatgcactctcaagagcttcactgttgaaaagggcatataccaaa
catctaattttagagtccaacccactgaatccattgtccgatttcctaatattacaaacctctgcccatttggagaagtgttcaacgccacta
ggtttgcatccgtgtacgcatggaacagaaaacgaatttctaattgtgtggcagactatagcgtgctgtataactcagcaagctttagcac
atttaagtgttatggagttagcccaaccaaattgaatgatctttgtttcacgaacgtgtacgccgatagcttcgttattcgaggggacgagg
tgaggcaaatcgctccaggtcaaaccggtaaaatcgccgattacaattataaacttcctgatgacttcactggctgtgtcatagcatgga
actctaataatctcgacagcaaggtcggtgggaactataactatctttatcgactctttagaaagagtaatctcaaaccattttgcagagac
atttgtacagagatttatcaggcagggagcacaccatgtaatggggtcgagggcttcaactgttacttccccctgcaatcttatgggttcc
agccgaccaatggagtgggctaccaaccttatcgcgtggtggtcctgtcttttgaactgcttcatgctccagccaccgtatgcggcccta
agaagtctacaaatttggtcaagaacaagtgcgtcaattttaacttcaatggtctgactggaaccggtgtcctcacagaatctaacaagaa
atttctgccatttcaacaatttggaagagatatcgcggatactacggatgctgttagggacccccaaacacttgaaattctcgacattaca
ccctgttcctttggcggggtcagtgtcattaccccgggtacaaatactagtaaccaagtcgcagtactgtatcaagatgttaattgtaccg
aagtgccggtagcaatacacgctgatcaacttacaccaacatggcgagtgtattctacggggagtaatgtcttccaaacgcgggccgg
gtgtctgattggcgcggaacacgtaaacaactcctacgaatgtgatattccaataggcgcaggcatatgtgcgagctatcaaacacaaa
ctaactcccctagacggcgtcggagtgtggctagtcaatcaatcattgcctatacaatgtctctgggagcagaaaacagcgtggcatatt
ccaataattccatcgctatacctaccaactttaccatcagcgtcactactgagattcttcccgtctccatgacgaaaacttccgttgattgta
ctatgtacatctgcggagacagcaccgaatgcagtaaccttctcttgcaatatggcagcttttgtactcagctcaacagagctctcacag
gtattgccgtcgaacaagataagaacacccaagaggtgttcgcccaggtgaaacagatatataagaccccacccatcaaggatttcgg
cgggtttaattttagtcaaatcctgcccgatccctcacggcgtcgcaggtcctttattgaagatcttctgttcaataaggtcacactcgctga
cgcaggctttatcaagcagtatggagattgtctgggcgatatagctgcgagggacttgatctgcgcacaaaagttcaacggccttacag
tgctgcccccgttgctgacagatgagatgattgcgcaatacacttccgcgcttctcgcagggaccatcacgagcggctggacgttcgg
cgctggcgccgctctgcaaatcccgtttgcaatgcaaatggcctataggtttaatggtatcggtgtaacgcaaaacgtactttatgaaaac
cagaaactgatcgctaaccaattcaattccgctattggcaaaattcaagacagcctcagcagcacggctagtgcactgggtaaactcca
agacgtggtgaaccaaaatgcccaagcattgaatacacttgtcaagcaacttagttccaacttcggtgcaatttcaagtggtccaaatga
catacttagcaggctgcctaaagtagaagccgaagtgcaaatcgatagacttatcaccggccgcctgcaatcccttcaaacatacgtga
ctcagcagcttatcagggctgctgagattcgagcaagtgcgaacctggccgccaccaaaatgagtgagtgcgtccttgggcaatcca
agcgcgttgacttttgtggtaaggggtatcatctcatgagcttcccccaatccgcccctcacggagtagtgtttctccatgtgacgtatgtt
cctgcacaagagaagaacttcacaacggctccggctatatgtcatgacggaaaagcgcactttcctcgcgaaggagtgtttgtgtcaaa
tggaacgcactggttcgtgacgcaaaggaatttctacgagcctcaaatcatcactacagataatacttttgtctctgggaattgcgacgtg
gtcattggaatcgtcaacaatacggtttacgatcccctgcaaccagaactggattcattcaaagaagaactcgacaagtacttcaagaat
cataccagtcctgatgtggatctgggcgatatcagtgggatcaatgcaagcgttgtcaacattcaaaaggaaatagaccgcctcaacga
agtcgcaaagaatctcaatgaaagccttattgatcttcaagagctcggaaaatatgagcaatatattaagtggccttggtccggcggctc
aggcggaagtggctcaggatatattcctgaggctccccgagatggacaagcatacgtgagaaaagatggggagtgggtgttgctga
gtacgttccttggatgataa (SEQ ID NO: 110)
gccaccauggacuggaccuggauacucuuucucguagcagcagccacacgagugcauucaauguucguguuccucgug
uccugccucucguuagcagccaauguguuaaucucaccaccagaacacagcucccacccgcguauacuaacucuuuuacg
aggggaguuuauuaucccgauaagguuuuccggucuagcguacuccacuccacccaagaucuguuccugccuuucuuua
gcaacgugacgugguuucaugcaauccacgugaguggcaccaauggaaccaagcgguucgauaauccuguguugccguu
uaacgauggcguguauuuugccucaacugaaaagucuaacauaauacgcggcuggaucuucgggaccacauuggauagu
aagugucaaucucugcuuaucgugaacaacgcuacuaacgucguuauaaaggucugugaguuccaauucugcaacgacc
cauuccuggguguguauuaccacaagaauaauaaaucuuggauggagucugaguuucgcguauacucuucugcuaacaa
cugcaccuuugaauauguaagucaaccauuccucauggaucuggaaggaaaacaaggcaacuuuaagaacuugcgggaau
uugucuucaagaacaucgacuguuauuuuaaaauuuacucaaaacacaccccgauuaaucugguccgcgauuugccccaa
ggguucucugcauuggaaccccuuguggacuugccuauaggaauuaauaucacccgcuuucaaacucuucuggcgcugc
accguagcuaccugacaccaggagauagcucuaguggcuggacugcuggagccgcggcauauuaugugggguaucugca
gccacguacauuucuccucaaauauaaugaaaaugguacaauaacggaugcagucgacugcgcauuggacccucugagug
aaacaaaaugcacucucaagagcuucacuguugaaaagggcauauaccaaacaucuaauuuuagaguccaacccacugaa
uccauuguccgauuuccuaauauuacaaaccucugcccauuuggagaaguguucaacgccacuagguuugcauccgugu
acgcauggaacagaaaacgaauuucuaauuguguggcagacuauagcgugcuguauaacucagcaagcuuuagcacauu
uaaguguuauggaguuagcccaaccaaauugaaugaucuuuguuucacgaacguguacgccgauagcuucguuauucga
ggggacgaggugaggcaaaucgcuccaggucaaaccgguaaaaucgccgauuacaauuauaaacuuccugaugacuucac
uggcugugucauagcauggaacucuaauaaucucgacagcaaggucggugggaacuauaacuaucuuuaucgacucuuu
agaaagaguaaucucaaaccauuuugcagagacauuuguacagagauuuaucaggcagggagcacaccauguaaugggg
ucgagggcuucaacuguuacuucccccugcaaucuuauggguuccagccgaccaauggagugggcuaccaaccuuaucg
cguggugguccugucuuuugaacugcuucaugcuccagccaccguaugcggcccuaagaagucuacaaauuuggucaag
aacaagugcgucaauuuuaacuucaauggucugacuggaaccgguguccucacagaaucuaacaagaaauuucugccauu
ucaacaauuuggaagagauaucgcggauacuacggaugcuguuagggacccccaaacacuugaaauucucgacauuacac
ccuguuccuuuggcggggucagugucauuaccccggguacaaauacuaguaaccaagucgcaguacuguaucaagaugu
uaauuguaccgaagugccgguagcaauacacgcugaucaacuuacaccaacauggcgaguguauucuacggggaguaau
gucuuccaaacgcgggccgggugucugauuggcgcggaacacguaaacaacuccuacgaaugugauauuccaauaggcg
caggcauaugugcgagcuaucaaacacaaacuaacuccccuagacggcgucggaguguggcuagucaaucaaucauugcc
uauacaaugucucugggagcagaaaacagcguggcauauuccaauaauuccaucgcuauaccuaccaacuuuaccaucag
cgucacuacugagauucuucccgucuccaugacgaaaacuuccguugauuguacuauguacaucugcggagacagcacc
gaaugcaguaaccuucucuugcaauauggcagcuuuuguacucagcucaacagagcucucacagguauugccgucgaac
aagauaagaacacccaagagguguucgcccaggugaaacagauauauaagaccccacccaucaaggauuucggcggguuu
aauuuuuagucaaauccugcccgaucccucacggcgucgcagguccuuuauugaagaucuucuguucaauaaggucacac
ucgcugacgcaggcuuuaucaagcaguauggagauugucugggcgauauagcugcgagggacuugaucugcgcacaaaa
guucaacggccuuacagugcugcccccguugcugacagaugagaugauugcgcaauacacuuccgcgcuucucgcaggg
accaucacgagcggcuggacguucggcgcuggcgccgcucugcaaaucccguuugcaaugcaaauggccuauagguuua
augguaucgguguaacgcaaaacguacuuuaugaaaaccagaaacugaucgcuaaccaauucaauuccgcuauuggcaaa
auucaagacagccucagcagcacggcuagugcacuggguaaacuccaagacguggugaaccaaaaugcccaagcauugaa
uacacuugucaagcaacquaguuccaacuucggugcaauuucaagugguccaaaugacauacuuagcaggcugccuaaag
uagaagccgaagugcaaaucgauagacuuaucaccggccgccugcaaucccuucaaacauacgugacucagcagcuuauc
agggcugcugagauucgagcaagugcgaaccuggccgccaccaaaaugagugagugcguccuugggcaauccaagcgcg
uugacuuuugugguaagggguaucaucucaugagcuucccccaauccgccccucacggaguaguguuucuccaugugac
guauguuccugcacaagagaagaacuucacaacggcuccggcuauaugucaugacggaaaagcgcacuuuccucgcgaag
gaguguuugugucaaauggaacgcacugguucgugacgcaaaggaauuucuacgagccucaaaucaucacuacagauaa
uacuuuugucucugggaauugcgacguggucauuggaaucgucaacaauacgguuuacgauccccugcaaccagaacug
gauucauucaaagaagaacucgacaaguacuucaagaaucauaccaguccugauguggaucugggcgauaucaguggga
ucaaugcaagcguugucaacauucaaaaggaaauagaccgccucaacgaagucgcaaagaaucucaaugaaagccuuauu
gaucuucaagagcucggaaaauaugagcaauauauuaaguggccuugguccggcggcucaggcggaaguggcucaggau
auauuccugaggcuccccgagauggacaagcauacgugagaaaagauggggaguggguguugcugaguacguuccuug
gaugauaa (SEQ ID NO: 111)
MDWTWILFLVAAATRVHSMFVFLVLLPLVSSQCVNLTTRTQLPPAYTNSFTRGVYY
PDKVFRSSVLHSTQDLFLPFFSNVTWFHAIHVSGTNGTKRFDNPVLPFNDGVYFASTE

[chemical structure]

[chemical structure]

LVRDLPQGFSALEPLVDLPIGINITRFQTLLALHRSYLTPGDSSSGWTAGAAAYYVGY
LQPRTFLLKYNENGTITDAVDCALDPLSETKCTLKSFTVEKGIYQTSNFRVQPTESIVR
FPNITNLCPFGEVFNATRFASVYAWNRKRISNCVADYSVLYNSASFSTFKCYGVSPTK
LNDLCFTNVYADSFVIRGDEVRQIAPGQTGKIADYNYKLPDDFTGCVIAWNSNNLDS

[chemical structure]

NGVGYQPYRVVVLSFELLHAPATVCGPKKSTNLVKNKCVNFNFNGLTGTGVLTESN
KKFLPFQQFGRDIADTTDAVRDPQTLEILDITPCSFGGVSVITPGTNTSNQVAVLYQD
VNCTEVPVAIHADQLTPTWRVYSTGSNVFQTRAGCLIGAEHVNNSYECDIPIGAGICA

[chemical structure]

KTSVDCTMYICGDSTECSNLLLQYGSFCTQLNRALTGIAVEQDKNTQEVFAQVKQIY

[chemical structure]

CAQKFNGLTVLPPLLTDEMIAQYTSALLAGTITSGWTFGAGAALQIPFAMQMAYRFN
GIGVTQNVLYENQKLIANQFNSAIGKIQDSLSSTASALGKLQDVVNQNAQALNTLVK

[chemical structure]

AATKMSECVLGQSKRVDFCGKGYHLMSFPQSAPHGVVFLHVTYVPAQEKNFTTAPA
ICHDGKAHFPREGVFVSNGTHWFVTQRNFYEPQIITTDNTFVSGNCDVVIGIVNNTVY
DPLQPELDSFKEELDKYFKNHTSPDVDLGDISGINASVVNIQKEIDRLNEVAKNLNES
LIDLQELGKYEQYIKWPWSGGSGGSGSGYIPEAPRDGQAYVRKDGEWVLLSTFLG**
(SEQ ID NO: 112)
WuS_DownDS2_2P_pVax
gccaccatggactggacctggatactctttctcgtagcagcagccacacgagtgcattcaatgttcgtgttcttggtgctgctgcctcttgt
ctcatcacagtgcgttaatctgaccacccgtacacaactcccacccgcatacacaaatagctttacacgcggagtgtattaccccgataa
agtctttcggagctcagtgctccattctactcaagatcttttcctgccgttctttagtaacgttacttggtttcatgcaatacatgtgtctggca
caaacggaaccaaacgttttgataatccggtgttgccatttaatgatggtgtatattttgcttccacggaaaagtcaaacatcatccgtggg
tggatctttggcaccactcttgatagcaaatgtcaaagccttctgattgttaataacgctacaaacgtcgtaattaaagtgtgtgaattccag
ttctgtaatgaccccttcctcggagtatattaccacaagaataacaaatcttggatggagagcgaatttagagtttacagttcagccaataa
ctgtacatttgaatatgtcagtcagcctttcctcatggacctcgaaggtaaacaaggtaattttaagaacttgagagagttcgtgtttaagaa
catcgatggctatttcaaaatttactctaagcacacaccaatcaacctggttcgagacctgccccagggtttctcagctttggaaccattg
gtggacctgccaatcggcattaacattaccagatttcaaactttgttggcactccaccggtcatatcttacccccggagacagttcctcag
gctggacggcaggcgccgccgcgtactatgttgggtatctccaaccccgaaccttccttctcaaatacaatgaaaacgggacgattac
agatgcagtcgattgcgccctggaccccttgtccgaaactaaatgcactctgaagagtttcacggtagagaagggaatctatcaaacga
gcaattttcgagtccaaccaacggaatctattgtgcggtttcccaatatcacaaacctctgtccattcggagaagtctttaatgctaccagg
tttgcgtctgtatatgcatggaaccgaaagaggatttccaattgcgtagcggactacagtgtcctttataacagcgcttcattttccacgttt
aagtgttatggtgtttctccaacgaaactcaacgacctctgttttactaacgtttacgctgacagctttgttatacgtggggacgaagtcag
gcaaattgctcctggacagactggaaagatcgctgattataattataaacttcctgacgatttcaccggctgcgttattgcatggaactcca
acaatctggattcaaaagtgggtggaaattataattatctgtataggttgtttcggaagagcaatcttaagccctttgagcgggacatatgt
accgaaatttaccaagcaggctccaccccatgcaatggagtagaagggttcaattgctattttcctctgcaaagttatggctttcaaccca
ccaacggagttgggtatcaaccttacagggttgtcgtgctgagtttcgaattgctccacgcacccgctacagtatgtggccccaagaag
tccactaatcttgttaagaataaatgcgtgaacttcaacttcaatggacttacaggtactggagtactcacggaatcaaacaagaaatttct
cccatttcaacagtttggccgagatatagctgacaccacagatgctgttcgcgacccccagacgttggaaatacttgatatcactccctg
cagcttcggcggcgtgagcgtgatcactccaggtactaatacgagcaatcaagttgccgttctgtaccaagatgtgaactgcaccgag
gttccagtggcaattcacgccgaccaacttactcccacctgggggtctattccaccggatcaaacgtcttccaaactcgcgctggttgc
cttatcggtgcagagcacgttaataattcctatgaatgtgacattcccataggagcaggcatctgtgcatcttatcaaacccagactaattc
ccctggttccgcttcctctgttgcatcccagtccataattgcctacactatgagtctcggggctgaaaattccgtggcctattctaataattc
aatcgccatcccaaccaattttaccatatccgtaacgactgaaatacttcctgtcagtatgaccaagacctcagtggactgcaccatgtac
atctgcggcgattctactgaatgttccaatctgcttttgcaatatggttcattctgcacccaactcaacagggctcttacagggatcgccgt
cgaacaggataagaatacccaggaagtgttcgcccaagttaagcaaatttacaagacaccacccatcaaggacttcggcgggttcaa
cttcagccaaattctgcccgacccgtctaagccttctaagcgctctttcattgaggatcttttgttcaataaggttacgcttgccgatgcagg
gtttatcaaacagtatggcgactgtcttggggatatcgcagctagggatcttatttgtgcacagaaatttaatggcctgactgttcttccccc
tttgctcactgacgagatgattgcccagtacacttcagctctcctggccgggactataacttctggttggaccttcggagctggcgccgc
cctgcaaattccatttgcaatgcagatggcttatcgcttcaacggaattggggtgacccaaaatgttctctacgagaaccagaaactcatt
gcaaaccagttcaattctgcgatcgggaagatccaggattccctgtctagtacggctagtgccctcggtaagctccaagacgtcgtcaa
ccaaaacgcccaggccttgaacacccttgtcaaacaactgagctccaattttggggctattagcagtgtgctgaatgatatcctgtcccg
ccttgacccaccggaagcggaagtccaaattgatcgactgatcactgggcgtctccaatcccttcaaacttacgtgacccaacaactca
tccgagcagctgagattagggctagcgctaaccttgctgctactaagatgtcagagtgtgtcctcggccagtctaagagagtggactttt
gtgggaaagggtaccacttgatgtcattcccacaaagcgccccacacggcgtggtgtttctccacgtcacttacgttccagctcaggaa
aagaactttaccaccgcccccgctatatgtcatgatgggaaggcccactttcctcgtgaaggtgtctttgtcagcaatggcacacactgg
tttgtgacccaacggaatttctatgagcctcagattattaccacggataacactttcgtatcagggaattgtgatgtggttatcggcatcgtt
aataatacagtgtatgacccactgcagccagagcttgacagcttcaaagaagagctcgataagtactttaagaatcatacaagtcctgac
gttgatcttggggatattagtgggattaacgccagcgtcgtcaatattcagaaagagattgacaggttgaacgaagtagctaagaatctt
aatgaaagcctgatagatttgcaagaacttggtaagtatgagcaggggtacatacccgaggctcctcgggatgggcaggcctatgtac
gcaaagacggtgaatgggtattgctcagcacttttctcggctgataa (SEQ ID NO: 113)
gccaccauggacuggaccuggauacucuuucucguagcagcagccacacgagugcauucaauguucguguucuuggugc
ugcugccucuugucucaucacagugcguuaaucugaccacccguacacaacucccacccgcauacacaaauagcuuuaca
cgcggaguguauuaccccgauaaagucuuucggagcucagugcuccauucuacucaagaucuuuuccugccguucuuua
guaacguuacuugguuucaugcaauacaugugucuggcacaaacggaaccaaacguuuugauaauccgguguugccauu
uaaugaugguguauauuuugcuuccacggaaaagucaaacaucauccguggguggaucuuuggcaccacucuugauagc
aaaugucaaagccuucugauuguuaauaacgcuacaaacgucguaauuaaagugugugaauuccaguucuguaaugacc
ccuuccucggaguauauuaccacaagaauaacaaaucuuggauggagagcgaauuuagaguuuacaguucagccaauaac
uguacauuugaauaugucagucagccuuuccucauggaccucgaagguaaacaagguaauuuuaagaacuugagagagu
ucguuuuaagaacaucgauggcuauuucaaaauuuacucuaagcacacaccaaucaaccugguucgagaccugccccag
gguuucucagcuuuggaaccauugguggaccugccaaucggcauuaacauuaccagauuucaaacuuuguuggcacucc
accggucauaucuuacccccggagacaguuccucaggcuggacggcaggcgccgccgcguacuauguuggguaucucca
accccgaaccuuccuucucaaauacaaugaaaacgggacgauuacagaugcagucgauugcgcccuggaccccuuguccg
aaacuaaaugcacucugaagaguuucacgguagagaagggaaucuaucaaacgagcaauuuucgaguccaaccaacggaa
ucuauugugcgguuucccaauaucacaaaccucuguccauucggagaagucuuuaaugcuaccagguuugcgucuguau
augcauggaaccgaaagaggauuuccaauugcguagcggacuacaguguccuuuauaacagcgcuucauuuuccacguu
uaaguguuaugguguuucuccaacgaaacucaacgaccucuguuuuacuaacguuuacgcugacagcuuuguuauacgu
ggggacgaagucaggcaaauugcuccuggacagacuggaaagaucgcugauuauaauuauaaacuuccugacgauuuca
ccggcugcguuauugcauggaacuccaacaaucuggauucaaaaguggguggaaauuauaauuaucuguauagguuguu
ucggaagagcaaucuuaagcccuuugagcgggacauauguaccgaaauuuaccaagcaggcuccaccccaugcaauggag
uagaaggguucaauugcuauuuuccucugcaaaguuauggcuuucaacccaccaacggaguuggguaucaaccuuacag
gguugucgugcugaguuucgaauugcuccacgcacccgcuacaguauguggccccaagaaguccacuaaucuuguuaag
aauaaaugcgugaacuucaacuucaauggacuuacagguacuggaguacucacggaaucaaacaagaaauuucucccauu
ucaacaguuuggccgagauauagcugacaccacagaugcuguucgcgacccccagacguuggaaauacuugauaucacuc
ccugcagcuucggcggcgugagcgugaucacuccagguacuaauacgagcaaucaaguugccguucuguaccaagaugu
gaacugcaccgagguuccaguggcaauucacgccgaccaacuuacucccaccuggcgggucuauuccaccggaucaaacg
ucuuccaaacucgcgcugguugccuuaucggugcagagcacguuaauaauuccuaugaaugugacauucccauaggagc
aggcaucugugcaucuuaucaaacccagacuaauuccccugguuccgcuuccucuguugcaucccaguccauaauugccu
acacuaugagucucggggcugaaaauuccguggccuauucuaauaauucaaucgccaucccaaccaauuuuaccauaucc
guaacgacugaaauacuuccugucaguaugaccaagaccucaguggacugcaccauguacaucugcggcgauucuacuga
auguuccaaucugcuuuugcaauaugguucauucugcacccaacucaacagggcucuuacagggaucgccgucgaacag
gauaagaauacccaggaaguguucgcccaaguuaagcaaauuuacaagacaccacccaucaaggacuucggcggguucaa
cuucagccaaauucugcccgacccgucuaagccuucuaagcgcucuuucauugaggaucuuuuguucaauaagguuacg
cuugccgaugcaggguuuaucaaacaguauggcgacugucuuggggauaucgcagcuagggaucuuauuugugcacag
aaauuuaauggccugacuguucuucccccuuugcucacugacgagaugauugcccaguacacuucagcucuccuggccg
ggacuauaacuucugguuggaccuucggagcuggcgccgcccugcaaauuccauuugcaaugcagauggcuuaucgcuu
caacggaauuggggugacccaaaauguucucuacgagaaccagaaacucauugcaaaccaguucaauucugcgaucggga
agauccaggauucccugucuaguacggcuagugcccucgguaagcuccaagacgucgucaaccaaaacgcccaggccuug
aacacccuugucaaacaacugagcuccaauuuuggggcuauuagcagugugcugaaugauauccugucccgccuugacc
caccggaagcggaaguccaaauugaucgacugaucacugggcgucuccaaucccuucaaacuuacgugacccaacaacuc
auccgagcagcugagauuagggcuagcgcuaaccuugcugcuacuaagaugucagaguguguccucggccagucuaaga
gaguggacuuuugugggaaaggguaccacuugaugucauucccacaaagcgccccacacggcgugguguuucuccacgu
cacuuacguuccagcucaggaaaagaacuuuaccaccgcccccgcuauaugucaugaugggaaggcccacuuuccucgug
aaggugucuuugucagcaauggcacacacugguuugugacccaacggaauuucuaugagccucagauuauuaccacgga
uaacacuuucguaucagggaauugugaugugguuaucggcaucguuaauaauacaguguaugacccacugcagccagag
cuugacagcuucaaagaagagcucgauaaguacuuuaagaaucauacaaguccugacguugaucuuggggauauuagug
ggauuaacgccagcgucgucaauauucagaaagagauugacagguugaacgaaguagcuaagaaucuuaaugaaagccu
gauagauuugcaagaacuugguaaguaugagcagggguacauacccgaggcuccucgggaugggcaggccuauguacgc
aaagacggugaauggguauugcucagcacuuuucucggcugauaa (SEQ ID NO: 114)
MDWTWILFLVAAATRVHSMFVFLVLLPLVSSQCVNLTTRTQLPPAYTNSFTRGVYY
PDKVFRSSVLHSTQDLFLPFFSNVTWFHAIHVSGTNGTKRFDNPVLPFNDGVYFASTE

[chemical structure]

ESEFRVYSSANNCTFEYVSQPFLMDLEGKQGNFKNLREFVFKNIDGYFKIYSKHTPIN
LVRDLPQGFSALEPLVDLPIGINITRFQTLLALHRSYLTPGDSSSGWTAGAAAYYVGY
LQPRTFLLKYNENGTITDAVDCALDPLSETKCTLKSFTVEKGIYQTSNFRVQPTESIVR
FPNITNLCPFGEVFNATRFASVYAWNRKRISNCVADYSVLYNSASFSTFKCYGVSPTK
LNDLCFTNVYADSFVIRGDEVRQIAPGQTGKIADYNYKLPDDFTGCVIAWNSNNLDS

[chemical structure]

NGVGYQPYRVVVLSFELLHAPATVCGPKKSTNLVKNKCVNFNFNGLTGTGVLTESN
KKFLPFQQFGRDIADTTDAVRDPQTLEILDITPCSFGGVSVITPGTNTSNQVAVLYQD
VNCTEVPVAIHADQLTPTWRVYSTGSNVFQTRAGCLIGAEHVNNSYECDIPIGAGICA

[chemical structure]

KTSVDCTMYICGDSTECSNLLLQYGSFCTQLNRALTGIAVEQDKNTQEVFAQVKQIY
KTPPIKDFGGFNFSQILPDPSKPSKRSFIEDLLFNKVTLADAGFIKQYGDCLGDIAARD
LICAQKFNGLTVLPPLLTDEMIAQYTSALLAGTITSGWTFGAGAALQIPFAMQMAYR
FNGIGVTQNVLYENQKLIANQFNSAIGKIQDSLSSTASALGKLQDVVNQNAQALNTL

[chemical structure]

NLAATKMSECVLGQSKRVDFCGKGYHLMSFPQSAPHGVVFLHVTYVPAQEKNFTT
APAICHDGKAHFPREGVFVSNGTHWFVTQRNFYEPQIITTDNTFVSGNCDVVIGIVNN
TVYDPLQPELDSFKEELDKYFKNHTSPDVDLGDISGINASVVNIQKEIDRLNEVAKNL
NESLIDLQELGKYEQGYIPEAPRDGQAYVRKDGEWVLLSTFLG** (SEQ ID NO: 115)
WuS_DownDS1_2P_pVax
gccaccatggactggacctggatactctttctcgtagcagcagccacacgagtgcattcaatgtttgttttccttgttctgctcccgcttgtg
tcttcccagtgcgtgaacctgaccacccgaactcaactcccaccagcatacaccaactcatttacaagaggagtttattacccggacaa
ggtatttcgaagttcagttcttcacagcacccaagacctgtttctgccattcttcagtaatgtcacttggtttcacgcgatacatgtcagcgg
tacaaacgggacaaagcgattcgataacccagtactcccattcaacgacggagtgtattttgcatctacagagaaatccaacattatacg
cgggtggatctttggaactactctggactccaagacacagagcctgctcattgtgaacaatgcaacgaatgtcgtcataaaagtctgtga
atttcaattttgcaacgatcctttcctcggagtctattaccataagaacaataagagttggatggagagtgagtttcgcgtctattcttccgc
gaacaattgtacatttgaatatgtatcacaaccctttcttatggatttggaaggcaaacaaggtaacttcaagaacttgcgcgagttcgtgtt
caagaacatagactgttattttaagatctatagtaagcatacgccaatcaatctggtgcgagatttgcctcagggcttttctgctcttgaacc
cttggttgatctgcccatcgggatcaacataaccagatttcaaacgttgctcgcactccaccgcagctatctcactcctggcgattcctcat
ctgggtggaccgccggagctgctgcttattacgtcggctatctccagccgcgtactttcctgctcaagtataatgagaatggcaccatta
ccgatgctgtggattgtgctcttgatccactctctgaaaccaaatgcactctcaagtcttttaccgtggaaaagggtatttatcagacatcta
attttcgggtgcaacctactgagtcaattgtacggtttcctaacataactaacctttgtccatttggggaagtcttcaatgccacgcggttcg
catcagtctatgcatggaacagaaaacgtatctccaactgcgtcgccgattattccgtcctttacaatagcgctagcttttccacattcaaat
gttatggcgtatcaccaaccaaacttaacgatctctgctttactaatgtctacgctgactctttcgttattcgaggtgacgaggtgcgccaa
attgcgcctggtcaaaccggaaagattgccgattataactacaagctccccgacgactttacgggttgtgtgatcgcctggaatagcaat
aacctcgattctaaagttggcggtaattataactatctgtacagactctttaggaaaagtaatctcaagcccttttgcagggatatctcaacc
gaaatctaccaagccggcagcactccttgcaatggtgtcgaggggtttaattgttatttcccactgcaatcttacggctttcaaccgactaa
tggagtcggttatcaaccctatagggtggtggtactctcctttgaacttttgcacgctccggcaacagtttgtggaccaaagaaaagtacg
aaccttgttaagaataagtgtgttaatttcaattttaacggcctcactggaacaggtgtcctcacagaaagcaacaagaagtttctccctttc
caacagtttggacgggatatcgccgacactactgacgccgtcagagatcctcaaactctcgaaatcttggatatcacaccatgttctttcg
gtggtgtctccgtcataacaccaggaactaacacctctaatcaagtggccgtgctctatcaggacgtcaattgcacagaagtgcctgtc
gcaatccatgctgatcagctcactcccacctggcgtgtgtattccactggctctaatgtctttcagacacgggcaggttgccttattgggg
cagagcatgtgaacaattcctacgaatgcgatatacccattggggcaggcatttgcgccagctaccaaacccaaactaacagccccg
ggagtgccagcagcgtggcatctcagtccattattgcctatacgatgagcctgggtgctgaaaatagcgtggcttatagtaataactctat
cgccatacccacaaacttcaccatttcagtgaccaccgaaatccttcctgtttctatgaccaaaacgtccgtcgattgtacaatgtacattt
gcggcgatagcactgaatgttcaaacctgctcctgcaatacggctctttctgtactcagctcaaccgggcactcaccggcatagccgtc
gaacaagacaagaatacccaggaagtctttgcgcaggtgaaacaaatctataagaccccaccaataaaagatttcggcggttttaatttc
agccaaatcttgcctgatcccagcaagccatctaaacggtctttcattgaagatctcctgttcaacaaggttacgctggctgacgccggg
tttattaagcaatatggcgattgccttggggacattgccgcacgagacctcatttgtgcccagaaattcaacgggctcaccgtattgcccc
cgctcctcacagacgaaatgatcgcccaatatacaagcgccctgcttgcgggaaccattacaagcggttggacctttggtgccggcgc
agctctgcaaatacccttcgcaatgcaaatggcatatcggtttaatggaattggcgtaacccaaaacgtgctgtatgaaaaccagaaact
gatcgcaaatcaattcaatagtgctataggaaagatccaagacagtctgtcttccactgctagcgcgctggggaagctccaagacgttg
tgaaccaaaacgcgcaggccctgaataccctggtgaagcaactttcaagcaatttcggtgctatatcttctgtcctcaatgacattctctct
cggctcgatcccccggaagccgaagttcagatagaccgtttgatcacaggccgcttgcaatccctgcaaacctacgttacacaacaac
tgattcgcgccgccgaaattcgggcatccgccaatctggccgcaaccaaaatgtccgagtgtgttctcggtcaatccaaacgcgtgga
tttctgcggaaaaggataccatttgatgtcatttccacaatcagctccacacggtgttgtattcctgcacgtgacctacgtgccagcccag
gagaagaattttactactgcgcccgccatttgtcatgacgggaaggctcattttcctcgggaaggggttttcgtctcaaacggtacccatt
ggttcgtgactcagaggaacttttatgaacctcaaatcataacgaccgataacacgtttgtaagtggcaattgcgacgtggtcatcggga
ttgtaaacaatactgtctatgaccctctccaaccagagcttgacagctttaaagaagagcttgataaatactttaagaaccatacctcacca
gacgtcgatttgggagatatcagtggcattaatgcctctgtcgtcaatatccagaaagagattgaccgcttgaacgaagttgccaagaat
cttaatgagtctctgattgacttgcaagaattgggaaaatatgaacaaggatatattccagaagcccctcgcgatgggcaagcatatgttc
gaaaggatggggaatgggtgctgctcagcacctttctcggttgataa (SEQ ID NO: 116)
gccaccauggacuggaccuggauacucuuucucguagcagcagccacacgagugcauucaauguuuguuuuccuuguuc
ugcucccgcuugugucuucccagugcgugaaccugaccacccgaacucaacucccaccagcauacaccaacucauuuacaa
gaggaguuuuuacccggacaagguauuucgaaguucaguucuucacagcacccaagaccuguuucugccauucuucag
uaaugucacuugguuucacgcgauacaugucagcgguacaaacgggacaaagcgauucgauaacccaguacucccauuca
acgacggaguguauuuugcaucuacagagaaauccaacauuauacgcggguggaucuuuggaacuacucuggacuccaa
gacacagagccugcucauugugaacaaugcaacgaaugucgucauaaaagucugugaauuucaauuuugcaacgauccu
uuccucggagucuauuaccauaagaacaauaagaguuggauggagagugaguuucgcgucuauucuuccgcgaacaauu
guacauuugaauauguaucacaacccuuucuuauggauuuggaaggcaaacaagguaacuucaagaacuugcgcgaguu
cguguucaagaacauagacuguuauuuuaagaucuauaguaagcauacgccaaucaaucuggugcgagauuugccucag
ggcuuuucugcucuugaacccuugguugaucugcccaucgggaucaacauaaccagauuucaaacguugcucgcacucc
accgcagcuaucucacuccuggcgauuccucaucuggguggaccgccggagcugcugcuuauuacgucggcuaucucca
gccgcguacuuuccugcucaaguauaaugagaauggcaccauuaccgaugcuguggauugugcucuugauccacucucu
gaaaccaaaugcacucucaagucuuuuaccguggaaaaggguauuuaucagacaucuaauuuucgggugcaaccuacug
agucaauuguacgguuuccuaacauaacuaaccuuuguccauuuggggaagucuucaaugccacgcgguucgcaucagu
cuaugcauggaacagaaaacguaucuccaacugcgucgccgauuauuccguccuuuacaauagcgcuagcuuuuccacau
ucaaauguuauggcguaucaccaaccaaacuuaacgaucucugcuuuacuaaugucuacgcugacucuuucguuauucg
aggugacgaggugcgccaaauugcgccuggucaaaccggaaagauugccgauuauaacuacaagcuccccgacgacuuua
cggguugugugaucgccuggaauagcaauaaccucgauucuaaaguuggcgguaauuauaacuaucuguacagacucuu
uaggaaaaguaaucucaagcccuuuugcagggauaucucaaccgaaaucuaccaagccggcagcacuccuugcaauggug
ucgagggguuuaauuguuauuucccacugcaaucuuacggcuuucaaccgacuaauggagucgguuaucaacccuauag
gguggugguacucuccuuugaacuuuugcacgcuccggcaacaguuuguggaccaaagaaaaguacgaaccuuguuaag
aauaaguguguuaauuucaauuuuaacggccucacuggaacagguguccucacagaaagcaacaagaaguuucucccuu
uccaacaguuuggacgggauaucgccgacacuacugacgccgucagagauccucaaacucucgaaaucuuggauaucaca
ccauguucuuucgguggugucuccgucauaacaccaggaacuaacaccucuaaucaaguggccgugcucuaucaggacg
ucaauugcacagaagugccugucgcaauccaugcugaucagcucacucccaccuggcguguguauuccacuggcucuaa
ugucuuucagacacgggcagguugccuuauuggggcagagcaugugaacaauuccuacgaaugcgauauacccauuggg
gcaggcauuugcgccagcuaccaaacccaaacuaacagccccgggagugccagcagcguggcaucucaguccauuauugc
cuauacgaugagccugggugcugaaaauagcguggcuuauaguaauaacucuaucgccauacccacaaacuucaccauuu
cagugaccaccgaaauccuuccuguuucuaugaccaaaacguccgucgauuguacaauguacauuugcggcgauagcacu
gaauguucaaaccugcuccugcaauacggcucuuucuguacucagcucaaccgggcacucaccggcauagccgucgaaca
agacaagaauacccaggaagucuuugcgcaggugaaacaaaucuauaagaccccaccaauaaaagauuucggcgguuuua
auuucagccaaaucuugccugaucccagcaagccaucuaaacggucuuucauugaagaucuccuguucaacaagguuacg
cuggcugacgccggguuuauuaagcaauauggcgauugccuuggggacauugccgcacgagaccucauuugugcccaga
aauucaacgggcucaccguauugcccccgcuccucacagacgaaaugaucgcccaauauacaagcgcccugcuugcggga
accauuacaagcgguuggaccuuuggugccggcgcagcucugcaaauacccuucgcaaugcaaauggcauaucgguuua
auggaauuggcguaacccaaaacgugcuguaugaaaaccagaaacugaucgcaaaucaauucaauagugcuauaggaaag
auccaagacagucugucuuccacugcuagcgcgcuggggaagcuccaagacguugugaaccaaaacgcgcaggcccugaa
uacccuggugaagcaacuuucaagcaauuucggugcuauaucuucuguccucaaugacauucucucucggcucgauccc
ccggaagccgaaguucagauagaccguuugaucacaggccgcuugcaaucccugcaaaccuacguuacacaacaacugau
ucgcgccgccgaaauucgggcauccgccaaucuggccgcaaccaaaauguccgaguguguucucggucaauccaaacgcg
uggauuucugccgaaaaggauaccauuugaugucauuuccacaaucagcuccacacgguguuguauuccugcacgugac
cuacgugccagcccaggagaagaauuuuacuacugcgcccgccauuugucaugacgggaaggcucauuuuccucgggaa
gggguuuucgucucaaacgguacccauugguucgugacucagaggaacuuuuaugaaccucaaaucauaacgaccgaua
acacguuuguaaguggcaauugcgacguggucaucgggauuguaaacaauacugucuaugacccucuccaaccagagcu
ugacagcuuuaaagaagagcuugauaaauacuuuaagaaccauaccucaccagacgucgauuugggagauaucaguggca
uuaaugccucugucgucaauauccagaaagagauugaccgcuugaacgaaguugccaagaaucuuaaugagucucugau
ugacuugcaagaauugggaaaauaugaacaaggauauauuccagaagccccucgcgaugggcaagcauauguucgaaag
gauggggaaugggugcugcucagcaccuuucucgguugauaa (SEQ ID NO: 117)
MDWTWILFLVAAATRVHSMFVFLVLLPLVSSQCVNLTTRTQLPPAYTNSFTRGVYY
PDKVFRSSVLHSTQDLFLPFFSNVTWFHAIHVSGTNGTKRFDNPVLPFNDGVYFASTE
KSNIIRGWIFGTTLDSKTQSLLIVNNATNVVIKVCEFQFCNDPFLGVYYHKNNKSWM

[chemical structure]

LVRDLPQGFSALEPLVDLPIGINITRFQTLLALHRSYLTPGDSSSGWTAGAAAYYVGY
LQPRTFLLKYNENGTITDAVDCALDPLSETKCTLKSFTVEKGIYQTSNFRVQPTESIVR
FPNITNLCPFGEVFNATRFASVYAWNRKRISNCVADYSVLYNSASFSTFKCYGVSPTK
LNDLCFTNVYADSFVIRGDEVRQIAPGQTGKIADYNYKLPDDFTGCVIAWNSNNLDS

[chemical structure]

GVGYQPYRVVVLSFELLHAPATVCGPKKSTNLVKNKCVNFNFNGLTGTGVLTESNK
KFLPFQQFGRDIADTTDAVRDPQTLEILDITPCSFGGVSVITPGTNTSNQVAVLYQDV
NCTEVPVAIHADQLTPTWRVYSTGSNVFQTRAGCLIGAEHVNNSYECDIPIGAGICAS

[chemical structure]

TSVDCTMYICGDSTECSNLLLQYGSFCTQLNRALTGIAVEQDKNTQEVFAQVKQIYK
TPPIKDFGGFNFSQILPDPSKPSKRSFIEDLLFNKVTLADAGFIKQYGDCLGDIAARDLI
CAQKFNGLTVLPPLLTDEMIAQYTSALLAGTITSGWTFGAGAALQIPFAMQMAYRFN
GIGVTQNVLYENQKLIANQFNSAIGKIQDSLSSTASALGKLQDVVNQNAQALNTLVK

[chemical structure]

AATKMSECVLGQSKRVDFCGKGYHLMSFPQSAPHGVVFLHVTYVPAQEKNFTTAPA
DPLQPELDSFKEELDKYFKNHTSPDVDLGDISGINASVVNIQKEIDRLNEVAKNLNES
LIDLQELGKYEQGYIPEAPRDGQAYVRKDGEWVLLSTFLG** (SEQ ID NO: 118)
WuS_2P_pVax
gccaccatggactggacctggatactctttctcgtagcagcagccacacgagtgcattcaatgtttgtgtttcttgtcctgttgccattggtg
agctcccaatgtgtcaatctgaccacccggacacaattgccccctgcatatacaaattcattcacgagaggagtatactatcccgacaaa
gttttccggtcctcagtccttcattccactcaagatcttttccttccattcttttctaacgtaacctggttccatgcaattcatgtcagtgggacc
aacggcacgaaacggtttgataatccagttcttccattcaatgacggagtatattttgcatcaactgagaaatctaatatcattagagggtg
gattttcggaacaactcttgactccaagacccaatccttgctcatcgttaacaatgctacaaatgtggttattaaggtctgtgagtttcaattc
tgtaacgacccctttctcggcgtatactaccataagaataataagtcttggatggagtctgaatttcgtgtctactcatcagcgaacaattgt
acatttgaatatgtgtcccaaccattcctgatggatctcgaaggaaagcagggcaattttaagaaccttcgggagttcgtctttaagaatat
cgatggatactttaaaatatatagtaaacacacaccaatcaatctggtccgagatctcccccagggttttagtgctctggagccgctggtg
gatttgcccatcggtatcaatattacgcgcttccaaacattgctcgccctgcatcggagttaccttacgcctggcgacagtagcagcgga
tggaccgctggagccgccgcctactatgtcgggtaccttcaaccacgcacttttctcctgaaatacaacgaaaatgggacaattacaga
cgctgttgattgcgcactcgatcccctgtcagaaacaaaatgtacacttaaatcttttacggtcgagaaagggatttaccagacatctaac
ttccgagtacaaccaaccgaatctatagtgcggttccccaacattacgaacctgtgcccgttcggcgaagtgttcaacgcaacacgattt
gcttctgtttacgcttggaaccggaaacgcatctccaattgcgtcgccgattacagcgttctttataattctgcatctttctccaccttcaaat
gctatggtgtctctcccacaaaactcaatgacctctgttttaccaatgtgtatgcggactccttcgtcatacgcggcgacgaggtgagaca
aatcgcaccagggcagactggcaagatcgctgattataattacaaactgcctgatgattttaccggatgcgttattgcttggaattctaata
acctcgattccaaagttggcgggaactacaattacctctaccgattgtttcgcaaatctaaccttaagccgtttgagagagatatcagcac
agagatttatcaagctggctctaccccttgcaatggagtagaaggctttaactgctattttcctcttcagtcttatggatttcaacctaccaac
ggggtagggtaccaaccctatagagtcgtcgtgctctcatttgaactccttcacgcccccgctaccgtgtgtgggcctaagaaatccact
aatctcgttaagaataagtgtgtgaattttaatttcaatggcctgacagggaccggggttctgactgaatctaacaagaaatttctgccgtt
ccaacaattcgggcgcgatattgcagacacgaccgacgcggtgcgcgatcctcaaacactcgaaatccttgatatcactccttgttcttt
cggcggtgtaagcgtcattactcctggcaccaatacctctaaccaagtggcagtactctatcaagatgtgaactgcactgaggtcccgg
ttgcaatacatgcggatcaactcaccccaacatggcgagtgtattccacagggagcaatgtgtttcaaacgagggccggctgtctcatt
ggggccgaacacgttaataatagttatgagtgcgatattcccattggagcgggcatttgtgccagctatcagacccaaactaactcccc
cgggtccgcctcatcagtcgctagccaatctattattgcgtacacaatgtccctgggagctgaaaacagcgtggcctactcaaataaca
gcattgcaatacccacaaattttacgatttcagtaaccactgaaatcctgcccgtctccatgaccaaaacctctgtcgactgcactatgtac
atatgcggcgactccaccgagtgttccaatctccttctccaatatggaagtttctgcacgcagttgaacagggcacttacagggattgca
gtcgagcaagacaagaacacccaagaagtattcgcacaagtaaaacagatctacaagacacccccaatcaaagattttggtggcttca
acttctcccaaatacttccagatccgtcaaagccatccaaacgctcattcatcgaagaccttctgttcaataaggtcacattggcggatgc
tggatttatcaagcaatatggggattgtttgggagatattgcagcgcgggacctgatatgcgcgcaaaagttcaatgggttgacggtgct
gccccctctcctcactgacgagatgatagctcagtatacgagcgctctcctcgcgggcactatcacctcaggttggaccttcggggctg
gcgcggcacttcaaataccatttgctatgcaaatggcctatcgttttaatggcatcggggtgacccaaaacgtgctctatgaaaaccaga
aactgatagctaatcaattcaatagtgccatcggcaaaatccaggattcattgtccagcaccgcctcagctctcgggaaattgcaagac
gtcgtcaaccaaaatgctcaagcgctcaacaccctcgttaaacaactctcaagtaatttcggcgcgattagtagcgtgctgaacgatatc
ttgagtcgtcttgatccacctgaagcagaagtccaaatcgacaggcttattaccggacgtctgcaaagcctgcaaacctacgttacaca
acaacttataagggcagccgaaataagggcttctgcaaatctggctgccacgaagatgagcgagtgtgtcctcggacaaagcaaaag
agttgacttttgcggcaaagggtaccaccttatgagtttccctcagtctgcgccccatggagtagtgtttctccacgtgacttatgtaccgg
cacaagaaaagaactttaccacagccccagcaatatgtcacgatggaaaagcacactttccacgggaaggggttttcgtgtccaacgg
gacccattggtttgttactcaacgcaacttttatgaaccccaaatcataaccactgataatacatttgtctctgggaactgtgatgtcgtgat
cggaatagtcaacaacacagtgtatgatccgttgcaaccagagctggattccttcaaagaagaactcgacaagtattttaagaatcacac
atcaccggacgtggatcttggagacatatcaggcataaacgctagtgtggtgaatatccaaaaggagatcgacaggcttaacgaagtt
gcaaagaacctcaatgaatctcttatcgatttgcaagaattgggcaaatacgagcaaggctacattcctgaagcaccacgggacgggc
aagcttacgtgcggaaagatggcgaatgggtgctcttgagtacctttctgggttgataa (SEQ ID NO: 119)
gccaccauggacuggaccuggauacucuuucucguagcagcagccacacgagugcauucaauguuuguguuucuugucc
uguugccauuggugagcucccaaugugucaaucugaccacccggacacaauugcccccugcauauacaaauucauucacg
agaggaguauacuaucccgacaaaguuuuccgguccucaguccuucauuccacucaagaucuuuuccuuccauucuuuu
cuaacguaaccugguuccaugcaauucaugucagugggaccaacggcacgaaacgguuugauaauccaguucuuccauu
caaugacggaguauauuuugcaucaacugagaaaucuaauaucauuagaggguggauuuucggaacaacucuugacucc
aagacccaauccuugcucaucguuaacaaugcuacaaaugugguuauuaaggucugugaguuucaauucuguaacgacc
ccuuucucggcguauacuaccauaagaauaauaagucuuggauggagucugaauuucgugucuacucaucagcgaacaa
uuguacauuugaauaugugucccaaccauuccugauggaucucgaaggaaagcagggcaauuuuaagaaccuucgggag
uucgucuuuaagaauaucgauggauacuuuaaaauauauaguaaacacacaccaaucaaucugguccgagaucuccccca
ggguuuuagugcucuggagccgcugguggauuugcccaucgguaucaauauuacgcgcuuccaaacauugcucgcccug
caucggaguuaccuuacgccuggcgacaguagcagcggauggaccgcuggagccgccgccuacuaugucggguaccuuc
aaccacgcacuuuucuccugaaauacaacgaaaaugggacaauuacagacgcuguugauugcgcacucgauccccuguca
gaaacaaaauguacacuuaaaucuuuuacggucgagaaagggauuuaccagacaucuaacuuccgaguacaaccaaccga
aucuauagugcgguuccccaacauuacgaaccugugcccguucggcgaaguguucaacgcaacacgauuugcuucuguu
uacgcuuggaaccggaaacgcaucuccaauugcgucgccgauuacagcguucuuuauaauucugcaucuuucuccaccu
ucaaaugcuauggugucucucccacaaaacucaaugaccucuguuuuaccaauguguaugcggacuccuucgucauacg
cggcgacgaggugagacaaaucgcaccagggcagacuggcaagaucgcugauuauaauuacaaacugccugaugauuuu
accggaugcguuauugcuuggaauucuaauaaccucgauuccaaaguuggcgggaacuacaauuaccucuaccgauugu
uucgcaaaucuaaccuuaagccguuugagagagauaucagcacagagauuuaucaagcuggcucuaccccuugcaaugga
guagaaggcuuuaacugcuauuuuccucuucagucuuauggauuucaaccuaccaacgggguaggguaccaacccuaua
gagucgucgugcucucauuugaacuccuucacgcccccgcuaccgugugugggccuaagaaauccacuaaucucguuaa
gaauaagugugugaauuuuaauuucaauggccugacagggaccgggguucugacugaaucuaacaagaaauuucugccg
uuccaacaauucgggcgcgauauugcagacacgaccgacgcggugcgcgauccucaaacacucgaaauccuugauaucac
uccuuguucuuucggcgguguaagcgucauuacuccuggcaccaauaccucuaaccaaguggcaguacucuaucaagau
gugaacugcacugaggucccgguugcaauacaugcggaucaacucaccccaacauggcgaguguauuccacagggagcaa
uguguuucaaacgagggccggcugucucauuggggccgaacacguuaauaauaguuaugagugcgauauucccauugga
gcgggcauuugugccagcuaucagacccaaacuaacucccccggguccgccucaucagucgcuagccaaucuauuauugc
guacacaaugucccugggagcugaaaacagcguggccuacucaaauaacagcauugcaauacccacaaauuuuacgauuu
caguaaccacugaaauccugcccgucuccaugaccaaaaccucugucgacugcacuauguacauaugcggcgacuccacc
gaguguuccaaucuccuucuccaauauggaaguuucugcacgcaguugaacagggcacuuacagggauugcagucgagc
aagacaagaacacccaagaaguauucgcacaaguaaaacagaucuacaagacacccccaaucaaagauuuugguggcuuca
acuucucccaaauacuuccagauccgucaaagccauccaaacgcucauucaucgaagaccuucuguucaauaaggucaca
uuggcggaugcuggauuuaucaagcaauauggggauuguuugggagauauugcagcgcgggaccugauaugcgcgcaa
aaguucaauggguugacggugcugcccccucuccucacugacgagaugauagcucaguauacgagcgcucuccucgcgg
gcacuaucaccucagguuggaccuucggggcuggcgcggcacuucaaauaccauuugcuaugcaaauggccuaucguuu
uaauggcaucggggugacccaaaacgugcucuaugaaaaccagaaacugauagcuaaucaauucaauagugccaucggca
aaauccaggauucauuguccagcaccgccucagcucucgggaaauugcaagacgucgucaaccaaaaugcucaagcgcuc
aacacccucguuaaacaacucucaaguaauuucggcgcgauuaguagcgugcugaacgauaucuugagucgucuugauc
caccugaagcagaaguccaaaucgacaggcuuauuaccggacgucugcaaagccugcaaaccuacguuacacaacaacuua
uaagggcagccgaaauaagggcuucugcaaaucuggcugccacgaagaugagcgaguguguccucggacaaagcaaaaga
guugacuuuugcggcaaaggguaccaccuuaugaguuucccucagucugcgccccauggaguaguguuucuccacguga
cuuauguaccggcacaagaaaagaacuuuaccacagccccagcaauaugucacgauggaaaagcacacuuuccacgggaa
gggguuuuuguccaacgggacccauugguuuguuacucaacgcaacuuuuaugaaccccaaaucauaaccacugaua
auacauuugucucugggaacugugaugucgugaucggaauagucaacaacacaguguaugauccguugcaaccagagcu
ggauuccuucaaagaagaacucgacaaguauuuuaagaaucacacaucaccggacguggaucuuggagacauaucaggca
uaaacgcuaguguggugaauauccaaaaggagaucgacaggcuuaacgaaguugcaaagaaccucaaugaaucucuuauc
gauuugcaagaauugggcaaauacgagcaaggcuacauuccugaagcaccacgggacgggcaagcuuacgugcggaaaga
uggcgaaugggugcucuugaguaccuuucuggguugauaa (SEQ ID NO: 120)
MDWTWILFLVAAATRVHSMFVFLVLLPLVSSQCVNLTTRTQLPPAYTNSFTRGVYY
PDKVFRSSVLHSTQDLFLPFFSNVTWFHAIHVSGTNGTKRFDNPVLPFNDGVYFASTE
KSNIIRGWIFGTTLDSKTQSLLIVNNATNVVIKVCEFQFCNDPFLGVYYHKNNKSWM
ESEFRVYSSANNCTFEYVSQPFLMDLEGKQGNFKNLREFVFKNIDGYFKIYSKHTPIN
LVRDLPQGFSALEPLVDLPIGINITRFQTLLALHRSYLTPGDSSSGWTAGAAAYYVGY
LQPRTFLLKYNENGTITDAVDCALDPLSETKCTLKSFTVEKGIYQTSNFRVQPTESIVR
FPNITNLCPFGEVFNATRFASVYAWNRKRISNCVADYSVLYNSASFSTFKCYGVSPTK
LNDLCFTNVYADSFVIRGDEVRQIAPGQTGKIADYNYKLPDDFTGCVIAWNSNNLDS
KVGGNYNYLYRLFRKSNLKPFERDISTEIYQAGSTPCNGVEGFNCYFPLQSYGFQPTN
GVGYQPYRVVVLSFELLHAPATVCGPKKSTNLVKNKCVNFNFNGLTGTGVLTESNK
KFLPFQQFGRDIADTTDAVRDPQTLEILDITPCSFGGVSVITPGTNTSNQVAVLYQDV
NCTEVPVAIHADQLTPTWRVYSTGSNVFQTRAGCLIGAEHVNNSYECDIPIGAGICAS

[chemical structure]

TSVDCTMYICGDSTECSNLLLQYGSFCTQLNRALTGIAVEQDKNTQEVFAQVKQIYK
TPPIKDFGGFNFSQILPDPSKPSKRSFIEDLLFNKVTLADAGFIKQYGDCLGDIAARDLI
CAQKFNGLTVLPPLLTDEMIAQYTSALLAGTITSGWTFGAGAALQIPFAMQMAYRFN
GIGVTQNVLYENQKLIANQFNSAIGKIQDSLSSTASALGKLQDVVNQNAQALNTLVK

[chemical structure]

AATKMSECVLGQSKRVDFCGKGYHLMSFPQSAPHGVVFLHVTYVPAQEKNFTTAPA
ICHDGKAHFPREGVFVSNGTHWFVTQRNFYEPQIITTDNTFVSGNCDVVIGIVNNTVY
DPLQPELDSFKEELDKYFKNHTSPDVDLGDISGINASVVNIQKEIDRLNEVAKNLNES
LIDLQELGKYEQGYIPEAPRDGQAYVRKDGEWVLLSTFLG** (SEQ ID NO: 121)
WuDivS_3F_D2P_Gly_pVax
ggatccgccaccatggattggacatggatattgttcttggttgcagcagctacccgggtacattccatgttcgtcttcctcgtactgctccc
acttgtcagtagtcaatgtgtgaacttgactacccggacgcagttgcccccggcctacactaatagcataacgcgtggagtctattaccc
cgacaaggtgttcaggtcatccgtcctgtatagcactcaagatctcttcttgcccttctttagtaacgtcacttggttccatgcaatccacgt
aagtggcactaatggcaccaagcgattcgacaatcccgtactcccttttaacgatggggtgtatttcgcgagcacagagaagtccaaca
tcatccgtggttggatcttcggcaccacactggattctaaaacccaaagcctgcttatagtaaataatgcaacaaacgtggtcattaaagt
ttgcgaatttcagttttgtaacgaccccttccttggcgtatattaccacaagaacaataaatcctggatggagagcgaatttagggtttaca
gttcagccaataattgtacattcgaatacgtaagccaacccttcttgatggacctggaaggaaagcaaggaaatttcaagaatctccgtg
aattcgtgttcaagaacatagacggctattttaaaatatattcaaaacacacaccgattaacctggtacgagatcttccgcaaggattctct
gcactggaaccgctggtcgatcttcctatcggcattaatatcactcggtttcaaacattgcttgctttgcatcggcgatatcttacacccgg
ggatagctcaagtggatggactgccggggctgctgcctattacgtaggctatctccaaccacggacattcctgctgaaatataacgaga
atgggacaatcacagatgctgttgactgcgctttggaccctttgagcgaaacaaagtgcacactcaaatccttcaccgtggaaaaggga
atctaccaaacgtctaattttcgcgtccaaccaaccgagagcatcgtcagattcccaaacattactaatctttgcccctttggcgaagtctt
caatgctacgcgatttgcgtccgtctacgcgtggaatcggaagcgcattagcaattgcgtcgcagactattcctttctctataactctgcat
ccttttctacctttaaatgttatggagtcaacgggacaaagctcaatgacctttgctttacaaatgtctatgcagactcttttgtcatccgtggt
gatgaggtacgacagatcgcgccaggacaaaccgggaagatcgccgattacaactacaaactgcccgacgatttcaccgggtgcgt
tattgcttggaactccaataatcttgatagtaaagttggcggcaactacaactacctgtatcgacttttccgtaaaagtaatctcaagccattt
gaaagagacatcaacacaacaatttatcaggctggatctaccccatgcaacggcgttgaaggatttaactgctacttccctctccaaagt
tacggtttccaaccaacaaacggcgttggctatcaaccttatagagtcgttgtcctctcttttgagcttaaccatgccccagcgacagtgtg
tgggccgaagaaaagcactaatttggttaagaataaatgtgttaactttaattttaatggattgacggggacaggggttctgacagagtct
aacaagaaatttctgccgttccaacagtttgggcgagatattgcagataccacggacgccgttcgagacccccaaacacttgaaattct
cgatataactccctgcagctttggcggtgtatccgttatcacgcccgggacaaataccagtaaccaagtcgcagtcctgtatcaaggcg
taaattgtacggaagtgcccgttgctatacacgctgaccaactgactcccacatggagagtctatagtactggttctaatgtgttccaaac
acgagccggttgcctgatcggagccgaacatgttaacaactcatacgaatgtgacataccgattggcgccggcatttgcgccagctat
caaacgcagaccaactcaccaagaaggcgtcgcagtgtagcaagtcaatctattatagcgtataccatgtctttgggagcagaaaactc
cgttgcttactctaataattctattgctatcccaaccaattttacaatctcagttactaccgaaatactgccggtaagcatgactaagacatcc
gtggattgcactatgtacatctgtggggactcaacagagtgtagtaatttgctgcttcaatatggctccttctgcactcaactgaatcgtgct
ctcacgggaattgctgttgagcaagataagaatacccaggaagtgtttgcccaagtcaaacaaatttataagacaccaccaattaaagat
tttggtggatttaatttcagccaaatacttccagatccctcacgcagacgacggtctttcatcgaggaccttctgttcaacaaagttactctg
gctgatgcaggcttcattaagcagtacggtgattgtcttggagacatcgctgcgcgcgacctcatatgcgcccagaaatttaatgggctg
accgtacttccccctttgctgactgatgagatgattgcacaatacacttccgcactccttgcgggtactatcacatccgggtggacttttgg
agctggcgccgctcttcaaattcccttcgccatgcaaatggcgtacaggtttaatggcatcggtgtgacacagaatgtgctctatgagaa
ccagaaacttatcgcaaaccagttcaattcagccatcgggaaaatccaagatagtctcagtagtactgcctcagctctcggcaagctcc
aggatgtagtgaatcagaatgcacaagccttgaacactctcgttaaacaactttcttccaactttggtgccatcagcagtgggcctaacg
atatattgagccgcttgcccaaagtggaagcggaagtccaaatagatagacttattaccggccggctgcaatctctgcaaacctatgtg
actcaacaattgatccgagctgccgaaatccgtgccagtgcaaatctcgccgcgaccaagatgagcgaatgtgtcttgggacagagc
aaaagagtcgatttctgcggaaaaggctaccacctgatgtctttccctcaatctgccccgcacggagtggtctttctccatgtgacttatgt
gccagcccaagaaaagaactttacaaccgcaccggcaatttgccatgacggaaaggcgcatttcccccgtgagggagtctttgtgag
caacgggacccattggttcgtgacacaacgcaatttctatgagcctcagatcattaccacggacaatactttcgtgtctggcaactgtga
cgtgctgataggcatcgtgaataataccgtctacgatcccttgcaacttgaactggactcattcaaagaagagctggataagtattttaag
aaccatacaagccctgatgtcgatcttggggatatatcaggcataaacgcatctgttgtgaatatccaaaaggaaattgatagattgaac
gaagttgccaagaacctcaatgaaagtcttatcgacctgcaagaactgggaaaatatgagcaatatataaaatggccatggagcgggc
gccggagacggagaaggggtagcggcggtagtggtagcgggtacatcccagaggcacccagagatggacaagcttacgtaagga
aggacggggaatgggtgctgctcagtacatttcttggatgataa (SEQ ID NO: 122)
ggauccgccaccauggauuggacauggauauuguucuugguugcagcagcuacccggguacauuccauguucgucuucc
ucguacugcucccacuugucaguagucaaugugugaacuugacuacccggacgcaguugcccccggccuacacuaauagc
auaacgcguggagucuauuaccccgacaagguguucaggucauccguccuguauagcacucaagaucucuucuugcccu
ucuuuaguaacgucacuugguuccaugcaauccacguaaguggcacuaauggcaccaagcgauucgacaaucccguacuc
ccuuuuaacgaugggguguauuucgcgagcacagagaaguccaacaucauccgugguuggaucuucggcaccacacugg
auucuaaaacccaaagccugcuuauaguaaauaaugcaacaaacguggucauuaaaguuugcgaauuucaguuuuguaac
gaccccuuccuuggcguauauuaccacaagaacaauaaauccuggauggagagcgaauuuaggguuuacaguucagccaa
uaauuguacauucgaauacguaagccaacccuucuugauggaccuggaaggaaagcaaggaaauuucaagaaucuccgug
aauucguguucaagaacauagacggcuauuuuaaaauauauucaaaacacacaccgauuaaccugguacgagaucuuccg
caaggauucucugcacuggaaccgcuggucgaucuuccuaucggcauuaauaucacucgguuucaaacauugcuugcuu
ugcaucggcgauaucuuacacccggggauagcucaaguggauggacugccggggcugcugccuauuacguaggcuaucu
ccaaccacggacauuccugcugaaauauaacgagaaugggacaaucacagaugcuguugacugcgcuuuggacccuuuga
gcgaaacaaagugcacacucaaauccuucaccguggaaaagggaaucuaccaaacgucuaauuuucgcguccaaccaaccg
agagcaucgucagauucccaaacauuacuaaucuuugccccuuuggcgaagucuucaaugcuacgcgauuugcguccgu
cuacgcguggaaucggaagcgcauuagcaauugcgucgcagacuauuccuuucucuauaacucugcauccuuuucuacc
uuuaaauguuauggagucaacgggacaaagcucaaugaccuuugcuuuacaaaugucuaugcagacucuuuugucaucc
guggugaugagguacgacagaucgcgccaggacaaaccgggaagaucgccgauuacaacuacaaacugcccgacgauuuc
accgggugcguuuuuuggaacuccaauaaucuugauaguaaaguuggcggcaacuacaacuaccuguaucgacuuu
uccguaaaaguaaucucaagccauuugaaagagacaucaacacaacaauuuaucaggcuggaucuaccccaugcaacggc
guugaaggauuuaacugcuacuucccucuccaaaguuacgguuuccaaccaacaaacggcguuggcuaucaaccuuauag
agucuuguccucucuuuugagcuuaaccaugccccagcgacagugugugggccgaagaaaagcacuaauuugguuaag
aauaaauguguuaacuuuaauuuuaauggauugacggggacagggguucugacagagucuaacaagaaauuucugccgu
uccaacaguuugggcgagauauugcagauaccacggacgccguucgagacccccaaacacuugaaauucucgauauaacu
cccugcagcuuuggcgguguauccguuaucacgcccgggacaaauaccaguaaccaagucgcaguccuguaucaaggcg
uaaauuguacggaagugcccguugcuauacacgcugaccaacugacucccacauggagagucuauaguacugguucuaa
uguguuccaaacacgagccgguugccugaucggagccgaacauguuaacaacucauacgaaugugacauaccgauuggc
gccggcauuugcgccagcuaucaaacgcagaccaacucaccaagaaggcgucgcaguguagcaagucaaucuauuauagc
guauaccaugucuuugggagcagaaaacuccguugcuuacucuaauaauucuauugcuaucccaaccaauuuuacaauc
ucaguuacuaccgaaauacugccgguaagcaugacuaagacauccguggauugcacuauguacaucuguggggacucaa
cagaguguaguaauuugcugcuucaauauggcuccuucugcacucaacugaaucgugcucucacgggaauugcuguuga
gcaagauaagaauacccaggaaguguuugcccaagucaaacaaauuuauaagacaccaccaauuaaagauuuugguggau
uuaauuucagccaaauacuuccagaucccucacgcagacgacggucuuucaucgaggaccuucuguucaacaaaguuacu
cuggcugaugcaggcuucauuaagcaguacggugauugucuuggagacaucgcugcgcgcgaccucauaugcgcccaga
aauuuaaugggcugaccguacuucccccuuugcugacugaugagaugauugcacaauacacuuccgcacuccuugcggg
uacuaucacauccggguggacuuuuggagcuggcgccgcucuucaaauucccuucgccaugcaaauggcguacagguuu
aauggcaucggugugacacagaaugugcucuaugagaaccagaaacuuaucgcaaaccaguucaauucagccaucgggaa
aauccaagauagucucaguaguacugccucagcucucggcaagcuccaggauguagugaaucagaaugcacaagccuuga
acacucucguuaaacaacuuucuuccaacuuuggugccaucagcagugggccuaacgauauauugagccgcuugcccaaa
guggaagcggaaguccaaauagauagacuuauuaccggccggcugcaaucucugcaaaccuaugugacucaacaauugau
ccgagcugccgaaauccgugccagugcaaaucucgccgcgaccaagaugagcgaaugugucuugggacagagcaaaagag
ucgauuucugcggaaaaggcuaccaccugaugucuuucccucaaucugccccgcacggaguggucuuucuccaugugac
uuaugugccagcccaagaaaagaacuuuacaaccgcaccggcaauuugccaugacggaaaggcgcauuucccccgugagg
gagucuuugugagcaacgggacccauugguucgugacacaacgcaauuucuaugagccucagaucauuaccacggacaa
uacuuucgugucuggcaacugugacgugcugauaggcaucgugaauaauaccgucuacgaucccuugcaacuugaacug
gacucauucaaagaagagcuggauaaguauuuuaagaaccauacaagcccugaugucgaucuuggggauauaucaggca
uaaacgcaucuguugugaauauccaaaaggaaauugauagauugaacgaaguugccaagaaccucaaugaaagucuuauc
gaccugcaagaacugggaaaauaugagcaauauauaaaauggccauggagcgggcgccggagacggagaagggguagcg
gcgguagugguagcggguacaucccagaggcacccagagauggacaagcuuacguaaggaaggacggggaaugggugcu
gcucaguacauuucuuggaugauaa (SEQ ID NO: 123)
MDWTWILFLVAAATRVHSMFVFLVLLPLVSSQCVNLTTRTQLPPAYTNSFTRGVYY
PDKVFRSSVLHSTQDLFLPFFSNVTWFHAIHVSGTNGTKRFDNPVLPFNDGVYFASTE
KSNIIRGWIFGTTLDSKTQSLLIVNNATNVVIKVCEFQFCNDPFLGVYYHKNNKSWM
ESEFRVYSSANNCTFEYVSQPFLMDLEGKQGNFKNLREFVFKNIDGYFKIYSKHTPIN
LVRDLPQGFSALEPLVDLPIGINITRFQTLLALHRSYLTPGDSSSGWTAGAAAYYVGY
LQPRTFLLKYNENGTITDAVDCALDPLSETKCTLKSFTVEKGIYQTSNFRVQPTESIVR

[chemical structure]

KLNDLCFTNVYADSFVIRGDEVRQIAPGQTGKIADYNYKLPDDFTGCVIAWNSNNLD

[chemical structure]

KKFLPFQQFGRDIADTTDAVRDPQTLEILDITPCSFGGVSVITPGTNTSNQVAVLYQD
VNCTEVPVAIHADQLTPTWRVYSTGSNVFQTRAGCLIGAEHVNNSYECDIPIGAGICA

[chemical structure]

KTSVDCTMYICGDSTECSNLLLQYGSFCTQLNRALTGIAVEQDKNTQEVFAQVKQIY

[chemical structure]

CAQKFNGLTVLPPLLTDEMIAQYTSALLAGTITSGWTFGAGAALQIPFAMQMAYRFN
GIGVTQNVLYENQKLIANQFNSAIGKIQDSLSSTASALGKLQDVVNQNAQALNTLVK

[chemical structure]

AATKMSECVLGQSKRVDFCGKGYHLMSFPQSAPHGVVFLHVTYVPAQEKNFTTAPA
ICHDGKAHFPREGVFVSNGTHWFVTQRNFYEPQIITTDNTFVSGNCDVVIGIVNNTVY
DPLQPELDSFKEELDKYFKNHTSPDVDLGDISGINASVVNIQKEIDRLNEVAKNLNES
LIDLQELGKYEQYIKWPWSGRRRRRRGSGGSGSGYIPEAPRDGQAYVRKDGEWVLL
STFLG** (SEQ ID NO: 124)
WuS_3F_2P_NoTri_pVax
ggatccgccaccatggactggacgtggattttgtttcttgtcgctgcagctacccgggttcactccatgtttgttttcctggtgctccttccc
cttgtaagctcacaatgcgtcaatttgaccacgcgtacacaactgcccccagcatatactaattctttcacacgcggggtctactatcccg
ataaagtctttagaagtagcgtacttcatagtacccaagatttgtttctgcccttcttcagcaatgtcacgtggtttcatgcgatccatgtatc
cggcacgaacgggacaaaacgatttgataaccccgtgctccccttcaacgacggggtttatttcgccagcaccgagaaatcaaatatta
tcaggggctggattttcgggacaacacttgattccaagacacaatctcttcttatcgtgaataatgcaactaatgtggtgatcaaggtttgc
gagttccaattttgtaatgacccttttcttggcgtgtactatcataagaataacaagagttggatggaatcagagttccgggtctacagcag
tgctaacaattgtacgtttgaatacgtttctcagccttttctgatggaccttgaaggtaagcaaggcaatttcaagaacttgcgggaatttgt
cttcaagaacatagatggctattttaagatatatagcaaacacactcccataaatctcgtcagagatcttccacagggctttagcgccctg
gaaccattggttgatttgccaattggaataaacataactcgattccaaaccttgctcgcactccatcggagctacctgacgcctggagatt
cctcttccggctggactgccggagcagcagcttattatgtaggctacttgcaaccccgcacgttcctgctcaaatataatgaaaatggca
ctataaccgatgcggtagactgcgctcttgatcccctgagtgaaactaaatgtacgttgaaaagctttactgtagagaaaggcatctatca
gactagtaactttagggtgcaacccacggagtccattgtacggttcccaaacattaccaacctctgtccattcggagaagtgtttaatgcc
acaagattcgcttcagtgtatgcctggaaccggaaacgcatctcaaattgcgttgccgattattcagtactttacaactcagccagtttctct
acttttaagtgctatggcgtttccccgacgaagctcaatgatctgtgctttactaacgtttacgcagactctttcgtcatcagaggcgatgaa
gtcaggcaaatagctcctggtcaaaccggcaagatcgccgactacaactataaactgcccgatgatttcactgggtgtgtgatcgcgtg
gaattccaataatttggactctaaggtaggtggcaactataactacctctatcgactcttccgaaaatccaaccttaagccgtttgaacgcg
atattagtaccgaaatataccaagccgggtctacaccctgtaacggcgttgaaggtttcaattgttactttccactgcagagttatggctttc
aacccaccaacggggttggctatcagccctatagggttgtggtcctcagttttgagcttctgcatgcaccagcaaccgtgtgcggacct
aagaagtcaacaaatctcgtgaagaacaagtgtgttaatttcaatttcaatggccttacagggaccggagtgcttacagaaagcaataag
aagttcttgccctttcaacagttcggcagggacatagcggacacgacagatgcagttcgagacccgcaaactctcgaaattctggatat
cacaccttgcagttttggtggcgtgtctgttatcacaccaggcaccaacacttccaaccaggtggcagttttgtaccaggatgttaattgta
cagaggtcccagtggcaatacacgctgaccaactgactccaacttggagagtctactctacaggctcaaacgtcttccaaacacgggc
ggggtgtctgatcggagcagaacacgttaataacagttacgagtgtgatatcccgataggagctggtatttgcgcttcataccagacgc
aaacgaactcaccacgaagacgccggtcagttgcatcacaatccattattgcatacaccatgtcactcggagcggagaattctgtagca
tacagtaacaatagtatcgcaatacctacgaactttaccatttccgtcacaactgaaatcttgcccgtctcaatgacaaagacaagcgtag
attgtacaatgtatatttgcggagattcaacagagtgctccaacctgctgctccagtacggtagtttctgtacccagctcaatagggccct
caccggaattgcagttgaacaagacaagaacacccaagaagtgtttgcacaagtcaaacaaatctataaaacacccccaatcaaagat
ttcggtggcttcaacttttcacaaattctccctgatcctagccgccgccgcagatcattcatcgaagacttgctcttcaataaggttaccctg
gcagacgccggttttattaaacaatacggagattgcctcggtgacatcgccgctagagaccttatctgtgcccaaaagttcaacggact
caccgtgctgcccccattgctgaccgatgaaatgattgctcaatatacatctgcgctcctcgcagggaccattacttcagggtggactttt
ggggctggcgccgcattgcagattcccttcgccatgcagatggcatataggtttaacggcattggagttacccaaaatgtactctacga
gaaccaaaagctgattgcaaatcagttcaacagtgcaataggcaaaatacaagactctctgtcttcaaccgccagcgctcttggaaagc
tccaagatgttgttaatcaaaatgcccaagcgttgaataccctcgtgaagcaactctccagcaattttggtgccatctctagcgtgctgaa
cgacattctgtcacggctcgatcccccggaagccgaggtacaaattgaccgattgataaccgggcgactccaaagccttcagacctac
gttacacaacagctcattcgcgctgcagaaattagagcctctgcaaatcttgcagctacaaagatgtcagagtgcgttctcggtcaaagc
aaaagagtggatttctgcggaaaggggtaccacctcatgagtttcccacagagtgcccctcatggcgtagtctttcttcatgttacttatgt
accagcccaagaaaagaatttcactacagcacccgcgatttgtcatgatggcaaagcgcacttccctcgggaaggcgtgttcgtgtcta
atggaacacattggttcgtgacgcaacggaatttctacgagccccaaattatcactactgataacaccttcgtctccggaaactgcgatgt
tgttattggcattgtcaacaataccgtttacgacccgctccaacctgagctggattcatttaaagaggaattggacaaatattttaagaatca
tacctctccagacgtggatttgggtgacattagcggaataaatgcatctgtggtcaatatccaaaaggaaattgataggctgaacgaggt
cgccaagaatttgaacgaatctttgattgatcttcaagaacttggcaagtatgaacaatacataaaatggccctggtgatag (SEQ ID
NO: 125)
ggauccgccaccauggacuggacguggauuuuguuucuugucgcugcagcuacccggguucacuccauguuuguuuuc
cuggugcuccuuccccuuguaagcucacaaugcgucaauuugaccacgcguacacaacugcccccagcauauacuaauuc
uuucacacgcggggucuacuaucccgauaaagucuuuagaaguagcguacuucauaguacccaagauuuguuucugccc
uucuucagcaaugucacgugguuucaugcgauccauguauccggcacgaacgggacaaaacgauuugauaaccccgugc
uccccuucaacgacgggguuuauuucgccagcaccgagaaaucaaauauuaucaggggcuggauuuucgggacaacacu
ugauuccaagacacaaucucuucuuaucgugaauaaugcaacuaauguggugaucaagguuugcgaguuccaauuuugu
aaugacccuuuucuuggcguguacuaucauaagaauaacaagaguuggauggaaucagaguuccgggucuacagcagug
cuaacaauuguacguuugaauacguuucucagccuuuuucugauggaccuugaagguaagcaaggcaauuucaagaacuu
gcgggaauuugucuucaagaacauagauggcuauuuuaagauauauagcaaacacacucccauaaaucucgucagagauc
uuccacagggcuuuagcgcccuggaaccauugguugauuugccaauuggaauaaacauaacucgauuccaaaccuugcu
cgcacuccaucggagcuaccugacgccuggagauuccucuuccggcuggacugccggagcagcagcuuauuauguaggc
uacuugcaaccccgcacguuccugcucaaauauaaugaaaauggcacuauaaccgaugcgguagacugcgcucuugaucc
ccugagugaaacuaaauguacguugaaaagcuuuacuguagagaaaggcaucuaucagacuaguaacuuuagggugcaa
cccacggaguccauuguacgguucccaaacauuaccaaccucuguccauucggagaaguguuuaaugccacaagauucgc
uucaguguaugccuggaaccggaaacgcaucucaaauugcguugccgauuauucaguacuuuacaacucagccaguuuc
ucuacuuuuaagugcuauggcguuuccccgacgaagcucaaugaucugugcuuuacuaacguuuacgcagacucuuucg
ucaucagaggcgaugaagucaggcaaauagcuccuggucaaaccggcaagaucgccgacuacaacuauaaacugcccgau
gauuucacugggugugugaucgcguggaauuccaauaauuuggacucuaagguagguggcaacuauaacuaccucuauc
gacucuuccgaaaauccaaccuuaagccguuugaacgcgauauuaguaccgaaauauaccaagccgggucuacacccugu
aacggcguugaagguuucaauuguuacuuuccacugcagaguuauggcuuucaacccaccaacgggguuggcuaucagc
ccuauaggguugugguccucaguuuugagcuucugcaugcaccagcaaccgugugcggaccuaagaagucaacaaaucu
cgugaagaacaaguguguuaauuucaauuucaauggccuuacagggaccggagugcuuacagaaagcaauaagaaguuc
uugcccuuucaacaguucggcagggacauagcggacacgacagaugcaguucgagacccgcaaacucucgaaauucugga
uaucacaccuugcaguuuugguggcgugucuguuaucacaccaggcaccaacacuuccaaccagguggcaguuuuguac
caggauguuaauuguacagaggucccaguggcaauacacgcugaccaacugacuccaacuuggagagucuacucuacagg
cucaaacgucuuccaaacacgggggggugucugaucggagcagaacacguuaauaacaguuacgagugugauaucccg
auaggagcugguauuugcgcuucauaccagacgcaaacgaacucaccacgaagacgccggucaguugcaucacaauccau
uauugcauacaccaugucacucggagcggagaauucuguagcauacaguaacaauaguaucgcaauaccuacgaacuuua
ccauuuccgucacaacugaaaucuugcccgucucaaugacaaagacaagcguagauuguacaauguauauuugcggagau
ucaacagagugcuccaaccugcugcuccaguacgguaguuucuguacccagcucaauagggcccucaccggaauugcagu
ugaacaagacaagaacacccaagaaguguuugcacaagucaaacaaaucuauaaaacacccccaaucaaagauuucggugg
cuucaacuuuucacaaauucucccugauccuagccgccgccgcagaucauucaucgaagacuugcucuucaauaagguua
cccuggcagacgccgguuuuauuaaacaauacggagauugccucggugacaucgccgcuagagaccuuaucugugccca
aaaguucaacggacucaccgugcugcccccauugcugaccgaugaaaugauugcucaauauacaucugcgcuccucgcag
ggaccauuacuucaggguggacuuuuggggcuggcgccgcauugcagauucccuucgccaugcagauggcauauaggu
uuaacggcauuggaguuacccaaaauguacucuacgagaaccaaaagcugauugcaaaucaguucaacagugcaauaggc
aaaauacaagacucucugucuucaaccgccagcgcucuuggaaagcuccaagauguuguuaaucaaaaugcccaagcguu
gaauacccucgugaagcaacucuccagcaauuuuggugccaucucuagcgugcugaacgacauucugucacggcucgau
cccccggaagccgagguacaaauugaccgauugauaaccgggcgacuccaaagccuucagaccuacguuacacaacagcu
cauucgcgcugcagaaauuagagccucugcaaaucuugcagcuacaaagaugucagagugcguucucggucaaagcaaaa
gaguggauuucugcggaaagggguaccaccucaugaguuucccacagagugccccucauggcguagucuuucuucaugu
uacuuauguaccagcccaagaaaagaauuucacuacagcacccgcgauuugucaugauggcaaagcgcacuucccucggg
aaggcguguucgugucuaauggaacacauugguucgugacgcaacggaauuucuacgagccccaaauuaucacuacuga
uaacaccuucgucuccggaaacugcgauguuguuauuggcauugucaacaauaccguuuacgacccgcuccaaccugagc
uggauucauuuaaagaggaauuggacaaauauuuuaagaaucauaccucuccagacguggauuugggugacauuagcgg
aauaaaugcaucuguggucaauauccaaaaggaaauugauaggcugaacgaggucgccaagaauuugaacgaaucuuug
auugaucuucaagaacuuggcaaguaugaacaauacauaaaauggcccuggugauag (SEQ ID NO: 126)
MDWTWILFLVAAATRVHSMFVFLVLLPLVSSQCVNLTTRTQLPPAYTNSFTRGVYY
PDKVFRSSVLHSTQDLFLPFFSNVTWFHAIHVSGTNGTKRFDNPVLPFNDGVYFASTE
KSNIIRGWIFGTTLDSKTQSLLIVNNATNVVIKVCEFQFCNDPFLGVYYHKNNKSWM
ESEFRVYSSANNCTFEYVSQPFLMDLEGKQGNFKNLREFVFKNIDGYFKIYSKHTPIN
LVRDLPQGFSALEPLVDLPIGINITRFQTLLALHRSYLTPGDSSSGWTAGAAAYYVGY
LQPRTFLLKYNENGTITDAVDCALDPLSETKCTLKSFTVEKGIYQTSNFRVQPTESIVR
FPNITNLCPFGEVFNATRFASVYAWNRKRISNCVADYSVLYNSASFSTFKCYGVSPTK
LNDLCFTNVYADSFVIRGDEVRQIAPGQTGKIADYNYKLPDDFTGCVIAWNSNNLDS
KVGGNYNYLYRLFRKSNLKPFERDISTEIYQAGSTPCNGVEGFNCYFPLQSYGFQPTN
GVGYQPYRVVVLSFELLHAPATVCGPKKSTNLVKNKCVNFNFNGLTGTGVLTESNK
KFLPFQQFGRDIADTTDAVRDPQTLEILDITPCSFGGVSVITPGTNTSNQVAVLYQDV
NCTEVPVAIHADQLTPTWRVYSTGSNVFQTRAGCLIGAEHVNNSYECDIPIGAGICAS

[chemical structure]

TSVDCTMYICGDSTECSNLLLQYGSFCTQLNRALTGIAVEQDKNTQEVFAQVKQIYK

[chemical structure]

AQKFNGLTVLPPLLTDEMIAQYTSALLAGTITSGWTFGAGAALQIPFAMQMAYRFNG
IGVTQNVLYENQKLIANQFNSAIGKIQDSLSSTASALGKLQDVVNQNAQALNTLVKQ

[chemical structure]

ATKMSECVLGQSKRVDFCGKGYHLMSFPQSAPHGVVFLHVTYVPAQEKNFTTAPAI
CHDGKAHFPREGVFVSNGTHWFVTQRNFYEPQIITTDNTFVSGNCDVVIGIVNNTVY
DPLQPELDSFKEELDKYFKNHTSPDVDLGDISGINASVVNIQKEIDRLNEVAKNLNES
LIDLQELGKYEQYIKWPW** (SEQ ID NO: 127)
WuS_3F_D2P_Gly_pVax
ggatccgccaccatggattggacatggatattgttcttggttgcagcagctacccgggtacattccatgttcgtcttcctcgtactgctccc
acttgtcagtagtcaatgtgtgaacttgactacccggacgcagttgcccccggcctacactaatagctttacgcgtggagtctattacccc
gacaaggtgttcaggtcatccgtcctgcatagcactcaagatctcttcttgcccttctttagtaacgtcacttggttccatgcaatccacgta
agtggcactaatggcaccaagcgattcgacaatcccgtactcccttttaacgatggggtgtatttcgcgagcacagagaagtccaacat
catccgtggttggatcttcggcaccacactggattctaaaacccaaagcctgcttatagtaaataatgcaacaaacgtggtcattaaagtt
tgcgaatttcagttttgtaacgaccccttccttggcgtatattaccacaagaacaataaatcctggatggagagcgaatttagggtttacag
ttcagccaataattgtacattcgaatacgtaagccaacccttcttgatggacctggaaggaaagcaaggaaatttcaagaatctccgtga
attcgtgttcaagaacatagacggctattttaaaatatattcaaaacacacaccgattaacctggtacgagatcttccgcaaggattctctg
cactggaaccgctggtcgatcttcctatcggcattaatatcactcggtttcaaacattgcttgctttgcatcggagttatcttacacccgggg
atagctcaagtggatggactgccggggctgctgcctattacgtaggctatctccaaccacggacattcctgctgaaatataacgagaat
gggacaatcacagatgctgttgactgcgctttggaccctttgagcgaaacaaagtgcacactcaaatccttcaccgtggaaaagggaat
ctaccaaacgtctaattttcgcgtccaaccaaccgagagcatcgtcagattcccaaacattactaatctttgcccctttggcgaagtcttca
atgctacgcgatttgcgtccgtctacgcgtggaatcggaagcgcattagcaattgcgtcgcagactattccgtgctctataactctgcatc
cttttctacctttaaatgttatggagtcaacgggacaaagctcaatgacctttgctttacaaatgtctatgcagactcttttgtcatccgtggtg
atgaggtacgacagatcgcgccaggacaaaccgggaagatcgccgattacaactacaaactgcccgacgatttcaccgggtgcgtta
ttgcttggaactccaataatcttgatagtaaagttggcggcaactacaactacctgtatcgacttttccgtaaaagtaatctcaagccatttg
aaagagacatcaacacaacaatttatcaggctggatctaccccatgcaacggcgttgaaggatttaactgctacttccctctccaaagtta
cggtttccaaccaacaaacggcgttggctatcaaccttatagagtcgttgtcctctcttttgagcttaaccatgccccagcgacagtgtgt
gggccgaagaaaagcactaatttggttaagaataaatgtgttaactttaattttaatggattgacggggacaggggttctgacagagtcta
acaagaaatttctgccgttccaacagtttgggcgagatattgcagataccacggacgccgttcgagacccccaaacacttgaaattctc
gatataactccctgcagctttggcggtgtatccgttatcacgcccgggacaaataccagtaaccaagtcgcagtcctgtatcaagacgta
aattgtacggaagtgcccgttgctatacacgctgaccaactgactcccacatggagagtctatagtactggttctaatgtgttccaaacac
gagccggttgcctgatcggagccgaacatgttaacaactcatacgaatgtgacataccgattggcgccggcatttgcgccagctatca
aacgcagaccaactcaccaagaaggcgtcgcagtgtagcaagtcaatctattatagcgtataccatgtctttgggagcagaaaactcc
gttgcttactctaataattctattgctatcccaaccaattttacaatctcagttactaccgaaatactgccggtaagcatgactaagacatccg
tggattgcactatgtacatctgtggggactcaacagagtgtagtaatttgctgcttcaatatggctccttctgcactcaactgaatcgtgctc
tcacgggaattgctgttgagcaagataagaatacccaggaagtgtttgcccaagtcaaacaaatttataagacaccaccaattaaagatt
ttggtggatttaatttcagccaaatacttccagatccctcacgcagacgacggtctttcatcgaggaccttctgttcaacaaagttactctg
gctgatgcaggcttcattaagcagtacggtgattgtcttggagacatcgctgcgcgcgacctcatatgcgcccagaaatttaatgggctg
accgtacttccccctttgctgactgatgagatgattgcacaatacacttccgcactccttgcgggtactatcacatccgggtggacttttgg
agctggcgccgctcttcaaattcccttcgccatgcaaatggcgtacaggtttaatggcatcggtgtgacacagaatgtgctctatgagaa
ccagaaacttatcgcaaaccagttcaattcagccatcgggaaaatccaagatagtctcagtagtactgcctcagctctcggcaagctcc
aggatgtagtgaatcagaatgcacaagccttgaacactctcgttaaacaactttcttccaactttggtgccatcagcagtgggcctaacg
atatattgagccgcttgcccaaagtggaagcggaagtccaaatagatagacttattaccggccggctgcaatctctgcaaacctatgtg
actcaacaattgatccgagctgccgaaatccgtgccagtgcaaatctcgccgcgaccaagatgagcgaatgtgtcttgggacagagc
aaaagagtcgatttctgcggaaaaggctaccacctgatgtctttccctcaatctgccccgcacggagtggtctttctccatgtgacttatgt
gccagcccaagaaaagaactttacaaccgcaccggcaatttgccatgacggaaaggcgcatttcccccgtgagggagtctttgtgag
caacgggacccattggttcgtgacacaacgcaatttctatgagcctcagatcattaccacggacaatactttcgtgtctggcaactgtga
cgtggtcataggcatcgtgaataataccgtctacgatcccttgcaacccgaactggactcattcaaagaagagctggataagtattttaa
gaaccatacaagccctgatgtcgatcttggggatatatcaggcataaacgcatctgttgtgaatatccaaaaggaaattgatagattgaa
cgaagttgccaagaacctcaatgaaagtcttatcgacctgcaagaactgggaaaatatgagcaatatataaaatggccatggagcggg
cgccggagacggagaaggggtagcggcggtagtggtagcgggtacatcccagaggcacccagagatggacaagcttacgtaagg
aaggacggggaatgggtgctgctcagtacatttcttggatgataa (SEQ ID NO: 128)
ggauccgccaccauggauuggacauggauauuguucuugguugcagcagcuacccggguacauuccauguucgucuucc
ucguacugcucccacuugucaguagucaaugugugaacuugacuacccggacgcaguugcccccggccuacacuaauagc
uuuacgcguggagucuauuaccccgacaagguguucaggucauccguccugcauagcacucaagaucucuucuugcccu
ucuuuaguaacgucacuugguuccaugcaauccacguaaguggcacuaauggcaccaagcgauucgacaaucccguacuc
ccuuuuaacgaugggguguauuucgcgagcacagagaaguccaacaucauccgugguuggaucuucggcaccacacugg
auucuaaaacccaaagccugcuuauaguaaauaaugcaacaaacguggucauuaaaguuugcgaauuucaguuuuguaac
gaccccuuccuuggcguauauuaccacaagaacaauaaauccuggauggagagcgaauuuaggguuuacaguucagccaa
uaauuguacauucgaauacguaagccaacccuucuugauggaccuggaaggaaagcaaggaaauuucaagaaucuccgug
aauucguguucaagaacauagacggcuauuuuaaaauauauucaaaacacacaccgauuaaccugguacgagaucuuccg
caaggauucucugcacuggaaccgcuggucgaucuuccuaucggcauuaauaucacucgguuucaaacauugcuugcuu
ugcaucggaguuaucuuacacccggggauagcucaaguggauggacugccggggcugcugccuauuacguaggcuaucu
ccaaccacggacauuccugcugaaauauaacgagaaugggacaaucacagaugcuguugacugcgcuuuggacccuuuga
gcgaaacaaagugcacacucaaauccuucaccguggaaaagggaaucuaccaaacgucuaauuuucgcguccaaccaaccg
agagcaucgucagauucccaaacauuacuaaucuuugccccuuuggcgaagucuucaaugcuacgcgauuugcguccgu
cuacgcguggaaucggaagcgcauuagcaauugcgucgcagacuauuccgugcucuauaacucugcauccuuuucuacc
uuuaaauguuauggagucaacgggacaaagcucaaugaccuuugcuuuacaaaugucuaugcagacucuuuugucaucc
guggugaugagguacgacagaucgcgccaggacaaaccgggaagaucgccgauuacaacuacaaacugcccgacgauuuc
accgggugcguuauugcuuggaacuccaauaaucuugauaguaaaguuggcggcaacuacaacuaccuguaucgacuuu
uccguaaaaguaaucucaagccauuugaaagagacaucaacacaacaauuuaucaggcuggaucuaccccaugcaacggc
guugaaggauuuaacugcuacuucccucuccaaaguuacgguuuccaaccaacaaacggcguuggcuaucaaccuuauag
agucuuguccucucuuuugagcuuaaccaugccccagcgacagugugugggccgaagaaaagcacuaauuugguuaag
aauaaauguguuaacuuuaauuuuaauggauugacggggacagggguucugacagagucuaacaagaaauuucugccgu
uccaacaguuugggcgagauauugcagauaccacggacgccguucgagacccccaaacacuugaaauucucgauauaacu
cccugcagcuuuggcgguguauccguuaucacgcccgggacaaauaccaguaaccaagucgcaguccuguaucaagacgu
aaauuguacggaagugcccguugcuauacacgcugaccaacugacucccacauggagagucuauaguacugguucuaau
guguuccaaacacgagccgguugccugaucggagccgaacauguuaacaacucauacgaaugugacauaccgauuggcgc
cggcauuugcgccagcuaucaaacgcagaccaacucaccaagaaggcgucgcaguguagcaagucaaucuauuauagcgu
auaccaugucuuugggagcagaaaacuccguugcuuacucuaauaauucuauugcuaucccaaccaauuuuacaaucuca
guuacuaccgaaauacugccgguaagcaugacuaagacauccguggauugcacuauguacaucuguggggacucaacag
aguguaguaauuugcugcuucaauauggcuccuucugcacucaacugaaucgugcucucacgggaauugcuguugagca
agauaagaauacccaggaaguguuugcccaagucaaacaaauuuauaagacaccaccaauuaaagauuuugguggauuua
auuucagccaaauacuuccagaucccucacgcagacgacggucuuucaucgaggaccuucuguucaacaaaguuacucug
gcugaugcaggcuucauuaagcaguacggugauugucuuggagacaucgcugcgcgcgaccucauaugcgcccagaaau
uuaaugggcugaccguacuucccccuuugcugacugaugagaugauugcacaauacacuuccgcacuccuugcggguac
uaucacauccggguggacuuuuggagcuggcgccgcucuucaaauucccuucgccaugcaaauggcguacagguuuaau
ggcaucggugugacacagaaugugcucuaugagaaccagaaacuuaucgcaaaccaguucaauucagccaucgggaaaau
ccaagauagucucaguaguacugccucagcucucggcaagcuccaggauguagugaaucagaaugcacaagccuugaaca
cucucguuaaacaacuuucuuccaacuuuggugccaucagcagugggccuaacgauauauugagccgcuugcccaaagu
ggaagcggaaguccaaauagauagacuuauuaccggccggcugcaaucucugcaaaccuaugugacucaacaauugaucc
gagcugccgaaauccgugccagugcaaaucucgccgcgaccaagaugagcgaaugugucuugggacagagcaaaagaguc
gauuucugcggaaaaggcuaccaccugaugucuuucccucaaucugccccgcacggaguggucuuucuccaugugacuu
augugccagcccaagaaaagaacuuuacaaccgcaccggcaauuugccaugacggaaaggcgcauuucccccgugaggga
gucuuugugagcaacgggacccauugguucgugacacaacgcaauuucuaugagccucagaucauuaccacggacaauac
uuucgugucuggcaacugugacguggucauaggcaucgugaauaauaccgucuacgaucccuugcaacccgaacuggac
ucauucasagaagagcuggauaaguauuuuaagaaccauacaagcccugaugucgaucuuggggauauaucaggcauaa
acgcaucuguugugaauauccaaaaggaaauugauagauugaacgaaguugccaagaaccucaaugaaagucuuaucgac
cugcaagaacugggaaaauaugagcaauauauaaaauggccauggagcgggcgccggagacggagaagggguagcggcg
guagugguagcggguacaucccagaggcacccagagauggacaagcuuacguaaggaaggacggggaaugggugcugcu
caguacauuucuuggaugauaa (SEQ ID NO: 129)
MDWTWILFLVAAATRVHSMFVFLVLLPLVSSQCVNLTTRTQLPPAYTNSFTRGVYY
PDKVFRSSVLHSTQDLFLPFFSNVTWFHAIHVSGTNGTKRFDNPVLPFNDGVYFASTE
KSNIIRGWIFGTTLDSKTQSLLIVNNATNVVIKVCEFQFCNDPFLGVYYHKNNKSWM
ESEFRVYSSANNCTFEYVSQPFLMDLEGKQGNFKNLREFVFKNIDGYFKIYSKHTPIN
LVRDLPQGFSALEPLVDLPIGINITRFQTLLALHRSYLTPGDSSSGWTAGAAAYYVGY
LQPRTFLLKYNENGTITDAVDCALDPLSETKCTLKSFTVEKGIYQTSNFRVQPTESIVR

[chemical structure]

KLNDLCFTNVYADSFVIRGDEVRQIAPGQTGKIADYNYKLPDDFTGCVIAWNSNNLD

[chemical structure]

KKFLPFQQFGRDIADTTDAVRDPQTLEILDITPCSFGGVSVITPGTNTSNQVAVLYQD
VNCTEVPVAIHADQLTPTWRVYSTGSNVFQTRAGCLIGAEHVNNSYECDIPIGAGICA

[chemical structure]

KTSVDCTMYICGDSTECSNLLLQYGSFCTQLNRALTGIAVEQDKNTQEVFAQVKQIY

[chemical structure]

CAQKFNGLTVLPPLLTDEMIAQYTSALLAGTITSGWTFGAGAALQIPFAMQMAYRFN
GIGVTQNVLYENQKLIANQFNSAIGKIQDSLSSTASALGKLQDVVNQNAQALNTLVK

[chemical structure]

AATKMSECVLGQSKRVDFCGKGYHLMSFPQSAPHGVVFLHVTYVPAQEKNFTTAPA
ICHDGKAHFPREGVFVSNGTHWFVTQRNFYEPQIITTDNTFVSGNCDVVIGIVNNTVY
DPLQPELDSFKEELDKYFKNHTSPDVDLGDISGINASVVNIQKEIDRLNEVAKNLNES
LIDLQELGKYEQYIKWPWSGRRRRRRGSGGSGSGYIPEAPRDGQAYVRKDGEWVLL
STFLG** (SEQ ID NO: 130)
WuS_3F_D2P_rB_pVax
ggatccgccaccatggattggacatggattctgtttctcgttgccgccgctacgcgcgtgcacagcatgttcgttttcctcgtactgttgcc
tctggtatcatctcaatgtgtgaatcttacgacgaggacgcaactgccaccagcttacaccaactcttttactagaggggtctattacccc
gacaaggttttcagatcctcagtgctgcatagtacacaagatttgtttcttcccttcttctccaatgtcacttggtttcacgctatccacgtgtc
cggcactaatggaacgaagcggtttgataacccggtacttccatttaatgacggggtatactttgcaagcaccgagaaaagtaatatcat
tcgtgggtggatctttggcactacactcgactccaagacacaatcccttttgatagtaaataatgctacaaatgtggttataaaggtgtgcg
agtttcaattctgcaatgaccccttcctcggtgtctattatcacaagaacaataaatcttggatggaaagtgagttcagggtatacagctct
gcaaacaactgcacatttgagtatgtgagccaaccgtttcttatggatctggaaggtaagcagggtaactttaagaaccttcgggagttc
gtctttaagaatatagatggctattttaaaatctatagtaaacacactcctattaaccttgtgcgcgatctccctcaagggttctctgcattgg
aaccgcttgttgatttgcctataggaatcaatattacacgatttcaaacactcctcgctctccataggagctaccttaccccaggcgactca
agctctggttggacggcaggagctgcagcatactatgtgggttatcttcagccgcggacattcttgcttaagtataatgagaatggaact
atcactgacgctgttgactgtgccctggaccctctttcagaaacaaaatgtactctcaaatcattcaccgtggagaagggaatatatcaaa
caagtaactttagggtccaacctaccgagagcatcgtgcgattccctaatattaccaatttgtgtcccttcggtgaagtcttcaacgcgac
ccgctttgctagcgtctatgcgtggaacaggaagcgaattagcaactgtgttgcagattacagtgtgctgtacaatagtgcgagcttttcc
acgttcaaatgctatggcgtgaaacctaccaaacttaatgatttgtgcttcactaatgtttatgctgacagcttcgttatccggggtgatgag
gtgaggcagattgcccccggtcaaactggcaaaattgccgactacaattacaagctccctgatgattttactggatgtgtcatagcgtgg
aattccaataatctggactctaaggttggtggtaattataactatctctaccgcctgtttcgtaagagcaatctgaaaccctttgaaagagat
atttggactgagatatatcaagctggctcaactccttgcaacggggtcgaaggtttcaattgttactttccacttcaatcatacgggtttcaa
ccaactaacggtgtaggttatcaaccctatcgggtggttgtcctgagctttgagctgaaccatgccccggctacagtatgcggcccaaa
gaaatccactaacttggtcaagaacaaatgcgtcaactttaactttaacggactcacggggacaggagtccttaccgaatccaacaaga
aattcttgcctttccaacaatttggacgagacattgcggataccacagacgcagtacgcgacccacagactcttgaaatcctcgacataa
caccctgcagtttcggcggtgtaagtgtcattaccccaggcactaatacgagcaaccaagtggcggtgctctaccaagacgttaattgc
actgaggtcccagtggctattcacgctgaccaacttacacccacatggagagtgtatagtacaggctcaaacgtcttccagacacggg
cggggtgccttattggagcagaacatgttaacaattcctatgaatgcgatatcccgattggagccgggatctgtgctagctatcaaaccc
aaacaaatagccccagacgtcgacgttccgtggctagtcaaagcatcatcgcctacactatgagtcttggggccgaaaattccgttgctt
acagtaacaacagtatcgctatccccaccaattttactattagtgtaactacagagattctgccggtttccatgacaaagacttccgtggat
tgtacgatgtatatttgcggcgacagcacagagtgcagcaatctgctgctgcaatacggtagtttctgcacccaattgaaccgtgctctg
acgggaattgcagttgagcaggacaagaatactcaagaagtatttgcacaagtcaaacagatatacaagacgcccccgattaaagattt
cggcgggtttaactttagccaaattcttccggaccccagcagacgccgccgaagctttattgaggacctgctgtttaataaagttaccctt
gctgatgctggttttatcaagcaatacggagattgcctgggagatatcgccgccagggatttgatctgtgcgcaaaagtttaacggcctt
accgttctcccgccccttctgaccgatgaaatgatagcccaatacacttccgcactcctggcaggcacaattacttccggctggacgttt
ggggccggggcagccttgcaaattccgtttgctatgcaaatggcatatcgtttcaatggtatcggcgtaacacaaaatgtcctttatgaga
accagaaactcattgctaatcagtttaattccgctatcggcaagattcaagacagtctcagcagcacggcgagcgcacttggtaaacttc
aagacgttgtcaaccagaatgctcaagccctgaacactctggtaaaacaacttagctctaatttcggtgcaattagctccggtccgaacg
atattctgtcacggctcccgaaagtcgaagccgaagtccagatcgataggctgatcacagggcgcttgcagagtctccaaacctacgt
gacgcaacaactcattcgggggctgaaattcgtgcaagcgctaatctggccgctaccaaaatgagtgagtgtgttctcggtcaatcaa
agagggttgacttttgcggcaaaggatatcatttgatgagttttccgcaatctgcccctcatggggtagtatttctgcacgtaacttatgtac
cagcacaagaaaagaacttcaccacggccccagcaatatgccacgatggcaaagctcatttccctcgcgaaggggtctttgtaagca
atggaacccactggtttgtcacacaacgcaacttttatgagcctcaaatcattacaaccgataacacttttgtctccgggaactgcgacgt
ggtgattggaatcgtcaacaacactgtctatgatcccctgcaacctgaactggattcctttaaagaagagcttgataagtatttcaagaac
cataccagccccgacgtcgatttgggagatattagtgggattaatgctagcgttgttaatatacaaaaggaaatagatcgattgaatgaa
gtggccaagaatctgaatgagtctctgattgacctgcaggagctcggaaagtatgagcaatatataaaatggccctggtcaggccgca
ggcgtcggcggcgcggtagcggcggttcaggatctgggtatatacctgaggccccacgagatgggcaggcttatgtacggaaagat
ggagaatgggtgttgctgagtactttcctcgggtaataa (SEQ ID NO: 131)
ggauccgccaccauggauuggacauggauucuguuucucguugccgccgcuacgcgcgugcacagcauguucguuuucc
ucguacuguugccucugguaucaucucaaugugugaaucuuacgacgaggacgcaacugccaccagcuuacaccaacucu
uuuacuagaggggucuauuaccccgacaagguuuucagauccucagugcugcauaguacacaagauuuguuucuucccu
ucuucuccaaugucacuugguuucacgcuauccacguguccggcacuaauggaacgaagcgguuugauaacccgguacu
uccauuuaaugacgggguauacuuugcaagcaccgagaaaaguaauaucauucguggguggaucuuuggcacuacacuc
gacuccaagacacaucccuuuugauaguaaauaaugcuacaaaugugguuauaaaggugugcgaguuucaauucugca
augaccccuuccucggugucuauuaucacaagaacaauaaaucuuggauggaaagugaguucaggguauacagcucugc
aaacaacugcacauuugaguaugugagccaaccguuucuuauggaucuggaagguaagcaggguaacuuuaagaaccuu
cgggaguucgucuuuaagaauauagauggcuauuuuaaaaucuauaguaaacacacuccuauuaaccuugugcgcgauc
ucccucaaggguucucugcauuggaaccgcuuguugauuugccuauaggaaucaauauuacacgauuucaaacacuccu
cgcucuccauaggagcuaccuuaccccaggcgacucaagcucugguuggacggcaggagcugcagcauacuaugugggu
uaucuucagccgcggacauucuugcuuaaguauaaugagaauggaacuaucacugacgcuguugacugugcccuggacc
cucuuucagaaacaaaauguacucucaaaucauucaccguggagaagggaauauaucaaacaaguaacuuuaggguccaa
ccuaccgagagcaucgugcgauucccuaauauuaccaauuugugucccuucggugaagucuucaacgcgacccgcuuug
cuagcgucuaugcguggaacaggaagcgaauuagcaacuguguugcagauuacagugugcuguacaauagugcgagcuu
uuccacguucaaaugcuauggcgugaaaccuaccaaacuuaaugauuugugcuucacuaauguuuaugcugacagcuuc
guuauccggggugaugaggugaggcagauugcccccggucaaacuggcaaaauugccgacuacaauuacaagcucccug
augauuuuacuggaugugucauagcguggaauuccaauaaucuggacucuaagguuggugguaauuauaacuaucucu
accgccuguuucguaagagcaaucugaaacccuuugaaagagauauuuggacugagauauaucaagcuggcucaacucc
uugcaacggggucgaagguuucaauuguuacuuuccacuucaaucauacggguuucaaccaacuaacgguguagguuau
caacccuaucgggugguuguccugagcuuugagcugaaccaugccccggcuacaguaugcggcccaaagaaauccacuaa
cuuggucaagaacaaaugcgucaacuuuaacuuuaacggacucacggggacaggaguccuuaccgaauccaacaagaaau
ucuugccuuuccaacaauuuggacgagacauugcggauaccacagacgcaguacgcgacccacagacucuugaaauccuc
gacauaacacccugcaguuucggcgguguaagugucauuaccccaggcacuaauacgagcaaccaaguggcggugcucua
ccaagacguuaauugcacugaggucccaguggcuauucacgcugaccaacuuacacccacauggagaguguauaguacag
gcucaaacgucuuccagacacgggggggugccuuauuggagcagaacauguuaacaauuccuaugaaugcgauauccc
gauuggagccgggaucugugcuagcuaucaaacccaaacaaauagccccagacgucgacguuccguggcuagucaaagca
ucaucgccuacacuaugagucuuggggccgaaaauuccguugcuuacaguaacaacaguaucgcuauccccaccaauuuu
acuauuaguguaacuacagagauucugccgguuuccaugacaaagacuuccguggauuguacgauguauauuugcggcg
acagcacagagugcagcaaucugcugcugcaauacgguaguuucugcacccaauugaaccgugcucugacgggaauugc
aguugagcaggacaagaauacucaagaaguauuugcacaagucaaacagauauacaagacgcccccgauuaaagauuucg
gcggguuuaacuuuagccaaauucuuccggaccccagcagacgccgccgaagcuuuauugaggaccugcuguuuaauaa
aguuacccuugcugaugcugguuuuaucaagcaauacggagauugccugggagauaucgccgccagggauuugaucug
ugcgcaaaaguuuaacggccuuaccguucucccgccccuucugaccgaugaaaugauagcccaauacacuuccgcacucc
uggcaggcacaauuacuuccggcuggacguuuggggccggggcagccuugcaaauuccguuugcuaugcaaauggcaua
ucguuucaaugguaucggcguaacacaaaauguccuuuaugagaaccagaaacucauugcuaaucaguuuaauuccgcu
aucggcaagauucaagacagucucagcagcacggcgagcgcacuugguaaacuucaagacguugucaaccagaaugcuca
agcccugaacacucugguaaaacaacuuagcucuaauuucggugcaauuagcuccgguccgaacgauauucugucacggc
ucccgaaagucgaagccgaaguccagaucgauaggcugaucacagggcgcuugcagagucuccaaaccuacgugacgcaa
caacucauucgggcggcugaaauucgugcaagcgcuaaucuggccgcuaccaaaaugagugaguguguucucggucaau
caaagaggguugacuuuugcggcaaaggauaucauuugaugaguuuuccgcaaucugccccucaugggguaguauuuc
ugcacguaacuuauguaccagcacaagaaaagaacuucaccacggccccagcaauaugccacgauggcaaagcucauuucc
cucgcgaaggggucuuuguaagcaauggaacccacugguuugucacacaacgcaacuuuuaugagccucaaaucauuaca
accgauaacacuuuugucuccgggaacugcgacguggugauuggaaucgucaacaacacugucuaugauccccugcaacc
ugaacuggauuccuuuaaagaagagcuugauaaguauuucaagaaccauaccagccccgacgucgauuugggagauauu
agugggauuaaugcuagcguuguuaauauacaaaaggaaauagaucgauugaaugaaguggccaagaaucugaaugagu
cucugauugaccugcaggagcucggaaaguaugagcaauauauaaaauggcccuggucaggccgcaggcgucggcggcg
cgguagcggcgguucaggaucuggguauauaccugaggccccacgagaugggcaggcuuauguacggaaagauggagaa
uggguguugcugaguacuuuccucggguaauaa (SEQ ID NO: 132)
MDWTWILFLVAAATRVHSMFVFLVLLPLVSSQCVNLTTRTQLPPAYTNSFTRGVYY
PDKVFRSSVLHSTQDLFLPFFSNVTWFHAIHVSGTNGTKRFDNPVLPFNDGVYFASTE
KSNIIRGWIFGTTLDSKTQSLLIVNNATNVVIKVCEFQFCNDPFLGVYYHKNNKSWM
ESEFRVYSSANNCTFEYVSQPFLMDLEGKQGNFKNLREFVFKNIDGYFKIYSKHTPIN
LVRDLPQGFSALEPLVDLPIGINITRFQTLLALHRSYLTPGDSSSGWTAGAAAYYVGY
LQPRTFLLKYNENGTITDAVDCALDPLSETKCTLKSFTVEKGIYQTSNFRVQPTESIVR

[chemical structure]

KLNDLCFTNVYADSFVIRGDEVRQIAPGQTGKIADYNYKLPDDFTGCVIAWNSNNLD

[chemical structure]

NKKFLPFQQFGRDIADTTDAVRDPQTLEILDITPCSFGGVSVITPGTNTSNQVAVLYQ
DVNCTEVPVAIHADQLTPTWRVYSTGSNVFQTRAGCLIGAEHVNNSYECDIPIGAGIC

[chemical structure]

TKTSVDCTMYICGDSTECSNLLLQYGSFCTQLNRALTGIAVEQDKNTQEVFAQVKQI

[chemical structure]

LICAQKFNGLTVLPPLLTDEMIAQYTSALLAGTITSGWTFGAGAALQIPFAMQMAYR
FNGIGVTQNVLYENQKLIANQFNSAIGKIQDSLSSTASALGKLQDVVNQNAQALNTL

[chemical structure]

NLAATKMSECVLGQSKRVDFCGKGYHLMSFPQSAPHGVVFLHVTYVPAQEKNFTT
APAICHDGKAHFPREGVFVSNGTHWFVTQRNFYEPQIITTDNTFVSGNCDVVIGIVNN
TVYDPLQPELDSFKEELDKYFKNHTSPDVDLGDISGINASVVNIQKEIDRLNEVAKNL
NESLIDLQELGKYEQYIKWPWSGRRRRRRGSGGSGSGYIPEAPRDGQAYVRKDGEW
VLLSTFLG** (SEQ ID NO: 133)
WuS_3F_D2P_pVax
ggatccgccaccatggactggacctggatactctttctcgtagcagcagccacacgagtgcattcaatgtttgtcttcttggtcctcttgcc
actggttagctcccagtgtgtgaatcttactacaaggacacaactgcccccagcttacacaaactcctttactaggggtgtatattaccca
gacaaagtgtttcgcagttctgtcctgcatagcacccaagaccttttccttccgttcttcagcaacgtcacctggttccatgctatccatgtc
agtggaacgaatggcacaaagcggttcgataaccctgtcctgccctttaacgacggcgtctatttcgcttcaacagagaagagtaacat
tatcagaggatggatatttggtacaactcttgatagcaagacacaaagcctgctgattgtaaacaacgcgacaaatgtcgtcatcaaggt
ttgcgagtttcaattttgcaacgatcccttcttgggcgtgtactatcataagaacaataaaagctggatggagagcgaatttagggtgtata
gctcagctaataactgtacatttgaatatgtctctcaacccttcctcatggaccttgagggaaagcaaggaaatttcaagaatctcagaga
atttgtcttcaagaacatcgacgggtatttcaagatctactccaagcatacacccatcaacttggttagggaccttccgcaaggtttctcag
cactggagcctctggtagatctccctattgggattaatattacaagatttcaaacactcctggccttgcatagatcctatcttacccctggg
gattccagctcaggttggaccgcgggtgccgcggcgtactatgtcggatatctccaacctcggacattcctgctgaaatacaatgaaaa
tgggaccatcactgatgccgttgattgtgctctcgatcctctgagtgagaccaaatgcactcttaagagttttacagtggagaaaggtatc
tatcaaactagtaatttcagagttcaaccaaccgagtcaatagtgcgttttccaaatatcactaatctgtgtccatttggggaagtcttcaat
gctacccgattcgcaagtgtgtacgcctggaaccggaaacggatttctaactgcgttgccgattatagtgtcctctataattctgcttctttc
tctacttttaagtgctatggggtgtcccccaccaagctgaacgatctgtgtttcactaacgtctacgccgatagttttgtcattagagggga
cgaggtacggcaaatcgcgcccggccaaacggggaaaattgccgattacaactacaagcttccagacgacttcacaggttgcgtgat
tgcatggaattctaataatctggacagtaaagtgggcggcaactataactatctttaccggctgtttcggaagagcaacttgaagcccttc
gaacgcgacatatccaccgagatctatcaagccggaagtaccccgtgcaacggggtagaaggatttaattgttattttccattgcagtctt
atggatttcagcccaccaatggtgtgggataccaaccttatagggttgttgttctctccttcgaactcctgcacgctccagctactgtatgt
gggcctaagaaaagtactaatctcgttaagaataaatgcgtcaatttcaatttcaacggcttgaccgggactggagtgctcaccgaaag
caacaagaagtttctcccgtttcagcaattcggtagggatattgccgatacgacagatgcagtacgagatccccaaacactcgaaatcc
tggacattacgccatgtagctttggcggagtaagtgtcatcaccccagggactaacaccagtaaccaagttgcggtactctatcaggat
gtgaactgcactgaggtacctgtagcaattcacgcagaccaattgacgccgacgtggcgcgtctatagtacaggaagtaacgtctttca
gacaagagcgggttgtttgattggcgctgaacacgttaacaattcttacgagtgtgatatccccatcggtgcggggatctgcgccagct
atcagacacaaaccaattccccacgaaggagacgttccgtggccagccagtcaataatcgcgtatactatgtctctgggtgcggagaa
ttcagtggcctattccaataattctatagccattccaaccaattttactataagcgtcactacagagatcttgccagttagcatgacgaaaac
cagcgtcgattgtaccatgtatatatgcggcgacagtaccgaatgctcaaatctgctgctccaatatggctcattttgcactcaacttaata
gagctctgacagggatcgctgtcgaacaagataagaacactcaggaagttttcgcccaagttaagcagatatacaagaccccgcccat
caaggattttggcggatttaatttctctcagatcctgccggaccctagccgccgacgccggagctttatcgaagacttgctgtttaataag
gttactctcgcagatgcaggcttcatcaagcaatacggtgactgccttggggatatcgctgctcgggacctgatctgtgctcagaaattc
aacggtctcacggtgctgcccccactcctgaccgacgaaatgattgcccagtatacgtccgcattgctcgctggcaccatcactagcg
gctggacctttggggccggagccgcgctccaaataccttttgctatgcaaatggcttatcgcttcaatggtattggggttacgcaaaatgt
cctctacgaaaatcaaaagctcatagctaaccaattcaatagcgctatagggaaaattcaagacagcctgagttccacagcaagcgcc
ctcggcaaacttcaagatgtagtgaaccaaaatgctcaagcactcaatacactggtcaaacaactctcaagcaatttcggggcaatctc
atctggtcctaatgacatattgagcaggctccccaaagtggaagcagaagtacaaatcgacaggctgattaccggacgactccaaagc
ttgcaaacttatgtaacccaacaacttatcagggctgcagaaatccgtgcaagcgctaacctcgccgctacgaagatgtcagaatgtgt
acttgggcagtctaagagggttgatttctgtggaaaagggtaccatctgatgagttttccacagagcgctccacatggggtggtgtttctg
catgtaacctatgttcccgctcaagaaaagaattttactactgcccccgcaatttgccatgacgggaaagcccatttcccccgagaggg
agttttcgtgagtaacggaacgcactggtttgtcactcagagaaatttctacgagccccaaatcattacgaccgataatacattcgtaagc
ggtaactgcgatgtcgtcattggcatcgttaacaacactgtttatgatccccttcaacccgagcttgactcatttaaagaggaactggataa
gtactttaagaatcacacctctcccgatgtcgacctgggcgacatctctggaattaatgcctctgtcgtaaacatccaaaaggaaattgac
cgactgaatgaggtggcaaagaatcttaatgaatccctgatcgatctgcaggagcttgggaagtatgagcaatacatcaaatggccatg
gtctggcagacggcgccggagaaggggctctggcggctctggaagcgggtatattccagaggcgcccagggatgggcaagcatat
gttcggaaggatggggagtgggtgttgttgtccacgttccttggctagtga (SEQ ID NO: 134)
ggauccgccaccauggacuggaccuggauacucuuucucguagcagcagccacacgagugcauucaauguuugucuucu
ugguccucuugccacugguuagcucccagugugugaaucuuacuacaaggacacaacugcccccagcuuacacaaacucc
uuuacuagggguguauauuacccagacaaguguuucgcaguucuguccugcauagcacccaagaccuuuuccuuccgu
ucuucagcaacgucaccugguuccaugcuauccaugucaguggaacgaauggcacaaagcgguucgauaacccuguccu
gcccuuuaacgacggcgucuauuucgcuucaacagagaagaguaacauuaucagaggauggauauuugguacaacucuu
gauagcaagacacaaagccugcugauuguaaacaacgcgacaaaugucgucaucaagguuugcgaguuucaauuuugcaa
cgaucccuucuugggcguguacuaucauaagaacaauaaaagcuggauggagagcgaauuuaggguguauagcucagcu
aauaacuguacauuugaauaugucucucaacccuuccucauggaccuugagggaaagcaaggaaauuucaagaaucucag
agaauuugucuucaagaacaucgacggguauuucaagaucuacuccaagcauacacccaucaacuugguuagggaccuuc
cgcaagguuucucagcacuggagccucugguagaucucccuauugggauuaauauuacaagauuucaaacacuccuggc
cuugcauagauccuaucuuaccccuggggauuccagcucagguuggaccgcgggugccgcggcguacuaugucggauau
cuccaaccucggacauuccugcugaaauacaaugaaaaugggaccaucacugaugccguugauugugcucucgauccucu
gagugagaccaaaugcacucuuaagaguuuuacaguggagaaagguaucuaucaaacuaguaauuucagaguucaaccaa
ccgagucaauagugcguuuuccaaauaucacuaaucuguguccauuuggggaagucuucaaugcuacccgauucgcaag
uguguacgccuggaaccggaaacggauuucuaacugcguugccgauuauaguguccucuauaauucugcuucuuucucu
acuuuuaagugcuauggggugucccccaccaagcugaacgaucuguguuucacuaacgucuacgccgauaguuuuguca
uuagaggggacgagguacggcaaaucgcgcccggccaaacggggaaaauugccgauuacaacuacaagcuuccagacgac
uucacagguugcgugauugcauggaauucuaauaaucuggacaguaaagugggggcaacuauaacuaucuuuaccggc
uguuucggaagagcaacuugaagcccuucgaacgcgacauauccaccgagaucuaucaagccggaaguaccccgugcaac
gggguagaaggauuuaauuguuauuuuccauugcagucuuauggauuucagcccaccaauggugugggauaccaaccu
uauaggguuguuguucucuccuucgaacuccugcacgcuccagcuacuguaugugggccuaagaaaaguacuaaucucg
uuaagaauaaaugcgucaauuucaauuucaacggcuugaccgggacuggagugcucaccgaaagcaacaagaaguuucuc
ccguuucagcaauucgguagggauauugccgauacgacagaugcaguacgagauccccaaacacucgaaauccuggacau
uacgccauguagcuuuggcggaguaagugucaucaccccagggacuaacaccaguaaccaaguugcgguacucuaucag
gaugugaacugcacugagguaccuguagcaauucacgcagaccaauugacgccgacguggcgcgucuauaguacaggaa
guaacgucuuucagacaagagcggguuguuugauuggcgcugaacacguuaacaauucuuacgagugugauauccccau
cggugcggggaucugcgccagcuaucagacacaaaccaauuccccacgaaggagacguuccguggccagccagucaauaa
ucgcguauacuaugucucugggugcggagaauucaguggccuauuccaauaauucuauagccauuccaaccaauuuuac
uauaagcgucacuacagagaucuugccaguuagcaugacgaaaaccagcgucgauuguaccauguauauaugcggcgaca
guaccgaaugcucaaaucugcugcuccaauauggcucauuuugcacucaacuuaauagagcucugacagggaucgcugu
cgaacaagauaagaacacucaggaaguuuucgcccaaguuaagcagauauacaagaccccgcccaucaaggauuuuggcg
gauuuaauuucucucagauccugccggacccuagccgccgacgccggagcuuuaucgaagacuugcuguuuaauaaggu
uacucucgcagaugcaggcuucaucaagcaauacggugacugccuuggggauaucgcugcucgggaccugaucugugcu
cagaaauucaacggucucacggugcugcccccacuccugaccgacgaaaugauugcccaguauacguccgcauugcucgc
uggcaccaucacuagcggcuggaccuuuggggccggagccgcgcuccaaauaccuuuugcuaugcaaauggcuuaucgc
uucaaugguauugggguuacgcaaaauguccucuacgaaaaucaaaagcucauagcuaaccaauucaauagcgcuauagg
gaaaauucaagacagccugaguuccacagcaagcgcccucggcaaacuucaagauguagugaaccaaaaugcucaagcac
ucaauacacuggucaaacaacucucaagcaauuucggggcaaucucaucugguccuaaugacauauugagcaggcucccc
aaaguggaagcagaaguacaaaucgacaggcugauuaccggacgacuccaaagcuugcaaacuuauguaacccaacaacu
uaucagggcugcagaaauccgugcaagcgcuaaccucgccgcuacgaagaugucagaauguguacuugggcagucuaag
aggguugauuucuguggaaaaggguaccaucugaugaguuuuccacagagcgcuccacauggggugguguuucugcau
guaaccuauguucccgcucaagaaaagaauuuuacuacugcccccgcaauuugccaugacgggaaagcccauuucccccg
agagggaguuuucgugaguaacggaacgcacugguuugucacucagagaaauuucuacgagccccaaaucauuacgacc
gaucgaucugcaggagcuugggaaguaugagcaauacaucaaauggccauggucuggcagacggcgccggagaaggggc
agcuugacucauuuaaagaggaacuggauaaguacuuuaagaaucacaccucucccgaugucgaccugggcgacaucucu
ggaauuaaugccucugucguaaacauccaaaaggaaauugaccgacugaaugagguggcaaagaaucuuaaugaaucccu
gaucgaucugcaggagcuugggaaguaugagcaauacaucaaauggccauggucuggcagacggcgccggagaaggggc
ucuggcggcucuggaagcggguauauuccagaggcgcccagggaugggcaagcauauguucggaaggauggggagugg
guguuguuguccacguuccuuggcuaguga (SEQ ID NO: 135)
MDWTWILFLVAAATRVHSMFVFLVLLPLVSSQCVNLTTRTQLPPAYTNSFTRGVYY
PDKVFRSSVLHSTQDLFLPFFSNVTWFHAIHVSGTNGTKRFDNPVLPFNDGVYFASTE
KSNIIRGWIFGTTLDSKTQSLLIVNNATNVVIKVCEFQFCNDPFLGVYYHKNNKSWM
ESEFRVYSSANNCTFEYVSQPFLMDLEGKQGNFKNLREFVFKNIDGYFKIYSKHTPIN
LVRDLPQGFSALEPLVDLPIGINITRFQTLLALHRSYLTPGDSSSGWTAGAAAYYVGY
LQPRTFLLKYNENGTITDAVDCALDPLSETKCTLKSFTVEKGIYQTSNFRVQPTESIVR
FPNITNLCPFGEVFNATRFASVYAWNRKRISNCVADYSVLYNSASFSTFKCYGVSPTK
LNDLCFTNVYADSFVIRGDEVRQIAPGQTGKIADYNYKLPDDFTGCVIAWNSNNLDS
KVGGNYNYLYRLFRKSNLKPFERDISTEIYQAGSTPCNGVEGFNCYFPLQSYGFQPTN
GVGYQPYRVVVLSFELLHAPATVCGPKKSTNLVKNKCVNFNFNGLTGTGVLTESNK
KFLPFQQFGRDIADTTDAVRDPQTLEILDITPCSFGGVSVITPGTNTSNQVAVLYQDV
NCTEVPVAIHADQLTPTWRVYSTGSNVFQTRAGCLIGAEHVNNSYECDIPIGAGICAS
YQTQTNSPRRRRSVASQSIIAYTMSLGAENSVAYSNNSIAIPTNFTISVTTEILPVSMTK
TSVDCTMYICGDSTECSNLLLQYGSFCTQLNRALTGIAVEQDKNTQEVFAQVKQIYK
TPPIKDFGGFNFSQILPDPSRRRRSFIEDLLFNKVTLADAGFIKQYGDCLGDIAARDLIC
AQKFNGLTVLPPLLTDEMIAQYTSALLAGTITSGWTFGAGAALQIPFAMQMAYRFNG
IGVTQNVLYENQKLIANQFNSAIGKIQDSLSSTASALGKLQDVVNQNAQALNTLVKQ
LSSNFGAISSGPNDILSRLPKVEAEVQIDRLITGRLQSLQTYVTQQLIRAAEIRASANLA
ATKMSECVLGQSKRVDFCGKGYHLMSFPQSAPHGVVFLHVTYVPAQEKNFTTAPAI
CHDGKAHFPREGVFVSNGTHWFVTQRNFYEPQIITTDNTFVSGNCDVVIGIVNNTVY
DPLQPELDSFKEELDKYFKNHTSPDVDLGDISGINASVVNIQKEIDRLNEVAKNLNES
LIDLQELGKYEQYIKWPWSGRRRRRRGSGGSGSGYIPEAPRDGQAYVRKDGEWVLL
STFLG** (SEQ ID NO: 136)
WuS_3F_2P_GlyDSol_pVax
ggatccgccaccatggactggacatggattttgtttcttgtggcggctgcaacgcgagttcattccatgtttgttttcctggttctcttgccg
ctcgtctctagtcaatgcgtcaatctgacgacaagaacgcaacttccccctgcctacaccaatagttttacccgtggcgtctattatccag
ataaagtgtttcgaagttcctgccttcattccacgcaagatctcttccttccattcttctctaatgtcacctggtttcatgcgatccacgtgtct
ggaaccaacgggactaaacgattcgacaatcccgtcctgccatttaacgatggagtatacttcgcatccaccgagaaatctggcattat
aagagggtggatattcgggactacactcgacagcaagacacaaagtctcctgattgttaacaacgcgacaaacgtcgtaattaaagttt
gcgaatttcaattttgtaatgacccgttcttgggcgtgtattatcacaagaataacaaaagttggatggaatccgaattccgggtttattcca
gcgcgaataattgcacatttgaatacgttagccaacctttcctgatggatctcgaaggcaaacaaggaaactttaagaatcttcgggaatt
cgttttcaagaacatcgacgggtactttaagatatactcaaaacacaccccaattaatttggtccgagatctgccgcaaggctttagtgcg
cttgagcccctcgtagatctcccaattggtattaatatcacacgctttcaaaccctgctggcattgcatcggagctatctgactcccggcg
atagttcttcagggtggacggcgggtgccgctgcttactatgtaggctatctgcagcctcgtacatttctcctcaaatacaatgaaaatgg
cactattaccgacgccgttgattgcgctctggacccactgagcgagactaaatgcaccctcaaatcattcactgttgagaagggaattta
ccaaacatcaaacttcagggtccaacctacggaaagcatcgtgcggttccccaacatcactaacctctgcccctttggagaagtatttaa
cgctacaaggttcgcttccgtctacgcctggaacaggaaaagaatcagtaattgcgtggctgattactccgtgctgtacaattccgcctc
attttctacatttaagtgttatggcgttaacgggactaagcttaacgacctctgcttcacaaacgtctatgccgacagctttgtcattcgcgg
ggatgaagtaagacagatagcacccggtcaaactggcaaaattgctgattacaattacaagttgccagatgatttcactggatgcgttat
agcatggaactctaacaaccttgactcaaaggttggtggcaactataattatttgtatcgcctgtttcgcaaatctaatctcaagcctttcga
gcgcgacataaatacgaccatataccaagcggggtccaccccttgtaatggagtcgaggggtttaattgctattttccgttgcaatcctac
gggttccaaccaacaaacggcgtcggctatcaaccctatcgggttgtcgtactctcattcgagctcaaccatgcaccagcaacagtttgt
ggccccaagaagagcacaaatttggtcaagaataaatgcgttaattttaatttcaatggtctgactggcacaggggttcttaccgaatcaa
ataagaagtttctgccatttcagcagttcggaagggactgtgcagggaccacagatgccgttagagacccccaaacactcgaaattctg
gacatcacgccatgcagtttcggtggtgttagcgtgattactccgggtactaatacgtccaaccaagtggctgtgttgtatcaagacgtta
actgtaccgaagttcctgtagcaatccatgccggtcaactgacccccacgtggcgagtttatagcaccggttccaacgtctttcaaacaa
gagccggatgtctcataggcgctgaacatgtgaataattcatacgaatgtgacattccaatcggcgcagggatttgcgcctcatatcaga
cacaaactaactccccgagaagacgtcgctcagtggcgtcacaaagcatcatcgcttatacgatgagcctctgcgccgagaactctgt
cgcatattctaacaactctattgcaattcctacaaattttacaatttcttgcactactgagatcctgcccgtaagcatgacgaaaacatcctg
cgactgcacaatgtatatctgtggcgactcaactgagtgctccaatctcctcttgcaatacggatctttctgtactcaactcaacagagcac
ttacaggaatagccgtcgaacaagacaagaacacacaagaggtcttcgcccaagtaaagcaatgttacaaaaccccacctattaaaga
ctttggtgggtttaatttctcacagattcttccagatccttcccgtagaaggagaagctttattgaagacctcttgtttaataaagtcactcttg
cagacgctgggtttattaaacaatatggagactgcttgggagacatagcggcaagagacctgatctgcgctcaaaagtttaatgggtgc
actgtgttgccaccccttctgaccgacgagatgatcgctcagtataccagtgccttgctggcagggaccataactagcggatggactttc
ggtgcaggagctgctctgcaaatcccttttgcgatgcaaatggcctacaggtttaatggtataggagttactcagaatgtcctgtacgaaa
atcaaaagctgatcgccaatcaattcaacagtgctattgggaaaatacaggacagtttgagttcaacagcgagcgctctcggcaaactg
caggatgttgtgaatcaaaacgcgcaagctttgaacactcttgtgaagcagctttcatccaacttcggagcgatctcatccgtcctgaac
gacatattgtcaagacttgacccacctgaagcggaagttcagatagaccgactcataacgggccgacttcagtccttgcagacatacgt
gacccaacaacttatccgcgcagccgaaataagggcttcagctaaccttgcagcaaccaaaatgtcagagtgcgtgctcggtcaaag
caagcgggtagacttttgtggcaaggggtatcatcttatgtcctttcctcaatccgcccctcacggggtggtcttcttgcactgcacttatgt
acctgctcaagagaagaattttacgaccgcccctgcgatctgtcacgacgggaaagcacatttcccccgcgagggagtctttgtgtcta
atggtactcattggtttgttacgcagcggaacttttacgaacctcaaataattacaacggataatacagatgttagtgggaattgcgacgtg
gtgatcggtatagtcaacaatacggtgtatgatccacttcaaccagaacttgattcctttaaggaagagctggacaaatatttcaagaacc
atacatcccctgacgtggaccttggcgatataagcggcattaatgcttcagtggtcaatatacaaaaggaaatcgatcgcctgaatgag
gtcgcaaagaatttgaatgagtccctgatcgacctgcaagagctcgggaaatatgagcagtacatcaagtggccctggtcaggtagac
gtaggcggcgccggggcagtggcggctcagggagcggttatatacccgaagcccctagagatgggcaagcttatgtccgaaagga
cggcgaatgggtgctcctttccactttcttgggataatag (SEQ ID NO: 137)
ggauccgccaccauggacuggacauggauuuuguuucuuguggcggcugcaacgcgaguucauuccauguuuguuuuc
cugguucucuugccgcucgucucuagucaaugcgucaaucugacgacaagaacgcaacuucccccugccuacaccaauag
uuuuacccguggcgucuauuauccagauaaaguguuucgaaguuccugccuucauuccacgcaagaucucuuccuucca
uucuucucuaaugucaccugguuucaugcgauccacgugucuggaaccaacgggacuaaacgauucgacaaucccgucc
ugccauuuaacgauggaguauacuucgcauccaccgagaaaucuggcauuauaagaggguggauauucgggacuacacu
cgacagcaagacacaaagucuccugauuguuaacaacgcgacaaacgucguaauuaaaguuugcgaauuucaauuuugua
augacccguucuugggcguguauuaucacaagaauaacaaaaguuggauggaauccgaauuccggguuuauuccagcgc
gaauaauugcacauuugaauacuuagccaaccuuuccugauggaucucgaaggcaaacaaggaaacuuuaagaaucuuc
gggaauucguuuucaagaacaucgacggguacuuuaagauauacucaaaacacaccccaauuaauuugguccgagaucug
ccgcaaggcuuuagugcgcuugagccccucguagaucucccaauugguauuaauaucacacgcuuucaaacccugcugg
cauugcaucggagcuaucugacucccggcgauaguucuucaggguggacgggggugccgcugcuuacuauguaggcu
aucugcagccucguacauuucuccucaaauacaaugaaaauggcacuauuaccgacgccguugauugcgcucuggaccca
cugagcgagacuaaaugcacccucaaaucauucacuguugagaagggaauuuaccaaacaucaaacuucaggguccaacc
uacauuuaaguguuauggcguuaacgggacuaagcuuaacgaccucugcuucacaaacgucuaugccgacagcuuuguc
ccgucuacgccuggaacaggaaaagaaucaguaauugcguggcugauuacuccgugcuguacaauuccgccucauuuuc
uacauuuaaguguuauggcguuaacgggacuaagcuuaacgaccucugcuucacaaacgucuaugccgacagcuuuguc
auucgcggggaugaaguaagacagauagcacccggucaaacuggcaaaauugcugauuacaauuacaaguugccagauga
uuucacuggaugcguuauagcauggaacucuaacaaccuugacucaaagguugguggcaacuauaauuauuuguaucgc
cuguuucgcaaaucuaaucucaagccuuucgagcgcgacauaaauacgaccauauaccaagcgggguccaccccuuguaa
uggagucgagggguuuaauugcuauuuuccguugcaauccuacggguuccaaccaacaaacggcgucggcuaucaaccc
uaucggguugucguacucucauucgagcucaaccaugcaccagcaacaguuuguggccccaagaagagcacaaauuugg
ucaagaauaaaugcguuaauuuuaauuucaauggucugacuggcacagggguucuuaccgaaucaaauaagaaguuucu
gccauuucagcaguucggaagggacugugcagggaccacagaugccguuagagacccccaaacacucgaaauucuggaca
ucacgccaugcaguuucggugguguuagcgugauuacuccggguacuaauacguccaaccaaguggcuguguuguauca
agacguuaacuguaccgaaguuccuguagcaauccaugccggucaacugacccccacguggcgaguuuauagcaccggu
uccaacgucuuucaaacaagagccggaugucucauaggcgcugaacaugugaauaauucauacgaaugugacauuccaau
cggcgcagggauuugcgccucauaucagacacaaacuaacuccccgagaagacgucgcucaguggcgucacaaagcauca
ucgcuuauacgaugagccucugcgccgagaacucugucgcauauucuaacaacucuauugcaauuccuacaaauuuuaca
auuucuugcacuacugagauccugcccguaagcaugacgaaaacauccugcgacugcacaauguauaucuguggcgacuc
aacugagugcuccaaucuccucuugcaauacggaucuuucuguacucaacucaacagagcacuuacaggaauagccgucg
aacaagacaagaacacacaagaggucuucgcccaaguaaagcaauguuacaaaaccccaccuauuaaagacuuugguggg
uuuaauuucucacagauucuuccagauccuucccguagaaggagaagcuuuauugaagaccucuuguuuaauaaaguca
cucuugcagacgcuggguuuauuaaacaauauggagacugcuugggagacauagcggcaagagaccugaucugcgcuca
aaaguuuaaugggugcacuguguugccaccccuucugaccgacgagaugaucgcucaguauaccagugccuugcuggca
gggaccauaacuagcggauggacuuucggugcaggagcugcucugcaaaucccuuuugcgaugcaaauggccuacaggu
uuaaugguauaggaguuacucagaauguccuguacgaaaaucaaaagcugaucgccaaucaauucaacagugcuauugg
gaaaauacaggacaguuugaguucaacagcgagcgcucucggcaaacugcaggauguugugaaucaaaacgcgcaagcuu
ugaacacucuugugaagcagcuuucauccaacuucggagcgaucucauccguccugaacgacauauugucaagacuugac
ccaccugaagcggaaguucagauagaccgacucauaacgggccgacuucaguccuugcagacauacgugacccaacaacu
uauccgcgcagccgaaauaagggcuucagcuaaccuugcagcaaccaaaaugucagagugcgugcucggucaaagcaagc
ggguagacuuuuguggcaagggguaucaucuuauguccuuuccucaauccgccccucacgggguggucuucuugcacu
gcacuuauguaccugcucaagagaagaauuuuacgaccgccccugcgaucugucacgacgggaaagcacauuucccccgc
gagggaguuuugugucuaaugguacucauugguuuguuacgcagcggaacuuuuacgaaccucaaauaauuacaacgg
auaauacagauguuagugggaauugcgacguggugaucgguauagucaacaauacgguguaugauccacuucaaccaga
acuugauuccuuuaaggaagagcuggacaaauauuucaagaaccauacauccccugacguggaccuuggcgauauaagcg
gcauuaaugcuucaguggucaauauacaaaaggaaaucgaucgccugaaugaggucgcaaagaauuugaaugagucccu
gaucgaccugcaagagcucgggaaauaugagcaguacaucaaguggcccuggucagguagacguaggcggcgccggggc
aguggcggcucagggagcgguuauauacccgaagccccuagagaugggcaagcuuauguccgaaaggacggcgaauggg
ugcuccuuuccacuuucuugggauaauag (SEQ ID NO: 138)
MDWTWILFLVAAATRVHSMFVFLVLLPLVSSQCVNLTTRTQLPPAYTNSFTRGVYY
PDKVFRSSCLHSTQDLFLPFFSNVTWFHAIHVSGTNGTKRFDNPVLPFNDGVYFASTE
KSGIIRGWIFGTTLDSKTQSLLIVNNATNVVIKVCEFQFCNDPFLGVYYHKNNKSWM
ESEFRVYSSANNCTFEYVSQPFLMDLEGKQGNFKNLREFVFKNIDGYFKIYSKHTPIN
LVRDLPQGFSALEPLVDLPIGINITRFQTLLALHRSYLTPGDSSSGWTAGAAAYYVGY
LQPRTFLLKYNENGTITDAVDCALDPLSETKCTLKSFTVEKGIYQTSNFRVQPTESIVR
FPNITNLCPFGEVFNATRFASVYAWNRKRISNCVADYSVLYNSASFSTFKCYGVNGT
KLNDLCFTNVYADSFVIRGDEVRQIAPGQTGKIADYNYKLPDDFTGCVIAWNSNNLD
SKVGGNYNYLYRLFRKSNLKPFERDINTTIYQAGSTPCNGVEGFNCYFPLQSYGFQPT
NGVGYQPYRVVVLSFELNHAPATVCGPKKSTNLVKNKCVNFNFNGLTGTGVLTESN
KKFLPFQQFGRDCAGTTDAVRDPQTLEILDITPCSFGGVSVITPGTNTSNQVAVLYQD
VNCTEVPVAIHAGQLTPTWRVYSTGSNVFQTRAGCLIGAEHVNNSYECDIPIGAGICA
SYQTQTNSPRRRRSVASQSIIAYTMSLCAENSVAYSNNSIAIPTNFTISCTTEILPVSMT
KTSCDCTMYICGDSTECSNLLLQYGSFCTQLNRALTGIAVEQDKNTQEVFAQVKQCY
KTPPIKDFGGFNFSQILPDPSRRRRSFIEDLLFNKVTLADAGFIKQYGDCLGDIAARDLI
CAQKFNGCTVLPPLLTDEMIAQYTSALLAGTITSGWTFGAGAALQIPFAMQMAYRFN
GIGVTQNVLYENQKLIANQFNSAIGKIQDSLSSTASALGKLQDVVNQNAQALNTLVK
QLSSNFGAISSVLNDILSRLDPPEAEVQIDRLITGRLQSLQTYVTQQLIRAAEIRASANL
AATKMSECVLGQSKRVDFCGKGYHLMSFPQSAPHGVVFLHCTYVPAQEKNFTTAPA
ICHDGKAHFPREGVFVSNGTHWFVTQRNFYEPQIITTDNTDVSGNCDVVIGIVNNTV
YDPLQPELDSFKEELDKYFKNHTSPDVDLGDISGINASVVNIQKEIDRLNEVAKNLNE
SLIDLQELGKYEQYIKWPWSGRRRRRRGSGGSGSGYIPEAPRDGQAYVRKDGEWVL
LSTFLG** (SEQ ID NO: 139)
WuS_3F_2P_Gly_pVax
ggatccgccaccatggattggacctggatacttttcctcgtggccgcagcaacaagagtccactccatgttcgtcttcttggtacttttgcc
actcgtcagttctcagtgcgttaacctgactactagaacccaattgcccccggcatacacaaactctttcacccggggtgtctactatccc
gacaaagtgtttagaagtagcgtgctgcacagcacccaagatctctttctgccattcttctcaaacgtcacctggtttcacgccatccatgt
aagcgggaccaacggcacaaagcgttttgataaccctgttttgccattcaatgatggcgtgtattttgcttccactgagaaaagcaacatc
attagagggtggatatttggcacaacgcttgactccaagacgcagagtcttttgatagtaaacaacgcaactaatgtggtcattaaagtct
gtgaatttcaattttgcaatgaccccttccttggagtctattaccacaagaacaacaaaagctggatggaaagcgaatttagggtctacag
ctctgccaataactgcacattcgaatacgtcagccaaccattcttgatggacctggaaggcaagcaaggaaactttaagaatctgaggg
aatttgtgtttaagaatatcgacggatattttaagatctattccaagcatactcccattaatctcgttcgtgaccttcctcagggtttctctgcat
tggaacccctcgtagatttgcccattgggattaatatcactagattccagacgctgcttgcactccatcgatcttatctgacccctggtgac
tcctcttccgggtggacggcgggtgctgcagcctactacgttggctatttgcaacctaggacctttctgttgaagtataatgagaatggga
ctattactgatgccgttgattgcgccctcgatccgctgtcagaaacaaagtgcaccctgaagagcttcacagtagaaaagggaatctatc
aaacctcaaatttccgcgttcaaccaactgaatcaatcgtgcgttttcctaacatcacaaatctgtgtccgtttggagaagtatttaatgcga
cgcgtttcgcaagcgtctacgcgtggaatcgcaaacgtatctctaattgcgtagcagattattctgtgctgtacaatagcgcatctttctca
acgtttaagtgctacggcgttaatgggaccaagctgaatgatctctgtttcactaatgtgtacgcagacagttttgtaattagaggagacg
aggttaggcaaatagcaccgggtcaaactggcaaaatcgccgactataactacaagctccctgatgacttcacgggctgcgtaattgct
tggaactctaataacctggactctaaagtcggcgggaattataattatctctatcggttgtttcgaaaatccaatctcaaaccctttgagcg
ggacatcaatactacaatttatcaagctggtagtactccttgcaatggggtagaaggcttcaattgttatttcccccttcaatcttacggattt
caacccacgaacggcgtagggtaccagccctatcgagtggtggtactgtcattcgaacttaatcacgccccagcaacagtctgcggg
cctaagaaaagcacgaatcttgtcaagaataagtgtgtaaatttcaacttcaatggtcttacaggcacgggagtgctcactgagtctaata
agaaatttcttcctttccaacaattcggtcgtgatattgccgatactactgatgcagtccgagatccacaaactctcgaaatcctcgatatta
ctccttgtagttttggcggcgtctccgtgatcaccccagggaccaacactagtaaccaagtggcggtgctctaccaagatgttaactgca
cagaagtcccggtagcgatccatgccgaccagctcactcccacatggcgtgtttacagcacagggtcaaacgttttccagacccgtgc
cggatgtcttataggagccgaacacgtaaataacagttatgaatgcgatatcccaattggtgcaggtatctgtgcgtcatatcaaaccca
aactaattctccgagacgacgacggagcgttgcctcacaatcaataatcgcctacacaatgtccctcggtgccgaaaattcagtcgctta
ctctaacaatagcattgctatccctaccaacttcactatttctgttaccacggaaattttgcctgtatccatgaccaaaacatctgttgattgc
acgatgtacatctgcggggattctaccgaatgttctaacctgcttctgcaatacggctccttctgcacccaattgaaccgcgcactgactg
ggattgctgtggaacaagacaagaatactcaagaagtatttgcccaggtcaaacagatttacaaaactcccccaattaaagatttcggc
ggtttcaattttagtcaaattctgccagatccaagtcgacgccgcaggagctttattgaggacctgctctttaataaagtcacgctggccg
acgccggcttcataaaacagtatggcgattgtcttggagacatcgccgcccgcgacctcatttgcgcacaaaagttcaatgggctcacc
gtgttgccaccactgctcacagatgagatgatcgcacagtacacgagcgcccttcttgccggcactatcacgtctggttggacgttcgg
tgccggagccgctctgcaaattccctttgcaatgcaaatggcctatagatttaatggaattggcgtaacacagaacgtgttgtacgagaa
ccagaagctcattgccaaccagttcaattccgctattggcaaaatacaagactctctcagctcaactgctagcgcactgggaaaattgca
agacgtagtcaatcaaaatgcccaagccctcaatactctcgtcaaacagttgtcttccaactttggggctatcagtagtgtactcaatgac
attctttcaagactggacccgcccgaggcggaagtccaaattgatcgtctgataactggaaggttgcaaagccttcagacctacgttac
gcaacaacttattagggctgccgaaataagggcatccgctaatctggcagctacaaagatgtctgaatgtgttttgggacagagcaaac
gggttgacttctgcggtaaaggttaccatctcatgtcttttccacaaagcgcaccgcacggagtcgtcttcctgcatgtaacatacgtccc
agcccaagaaaagaattttaccacagccccagccatctgccacgacggcaaggcgcatttcccaagggaaggcgtgtttgtatccaa
cgggacgcattggtttgtcactcaaaggaacttttacgaaccccaaattattaccactgataacaccttcgtttctgggaactgtgatgtcg
tgattgggatagtaaacaacacggtatatgatccactgcaaccagaactggattccttcaaagaagagctggacaaatacttcaagaat
catactagtcctgacgtcgacctgggcgatatcagtggaatcaacgctagcgtcgtaaacattcaaaaggagatcgatagacttaacga
ggtcgccaagaatctcaatgaaagcctcatcgatttgcaagaactcggaaaatatgagcaatacataaaatggccatggtctggcagg
agaagacgcaggagaggtagcggcggcagcggatcagggtacattccggaagcccccagggacggacaggcatatgtccgcaa
ggacggagaatgggttcttcttagcacttttctggggtaataa (SEQ ID NO: 140)
ggauccgccaccauggauuggaccuggauacuuuuccucguggccgcagcaacaagaguccacuccauguucgucuucu
ugguacuuuugccacucgucaguucucagugcguuaaccugacuacuagaacccaauugcccccggcauacacaaacucu
uucacccggggugucuacuaucccgacaaaguguuuagaaguagcgugcugcacagcacccaagaucucuuucugccau
ucuucucaaacgucaccugguuucacgccauccauguaagcgggaccaacggcacaaagcguuuugauaacccuguuuu
gccauucaaugauggcguguauuuugcuuccacugagaaaagcaacaucauuagaggguggauauuuggcacaacgcuu
gacuccaagacgcagagucuuuugauaguaaacaacgcaacuaauguggucauuaaagucugugaauuucaauuuugca
augaccccuuccuuggagucuauuaccacaagaacaacaaaagcuggauggaaagcgaauuuagggucuacagcucugcc
aauaacugcacauucgaauacgucagccaaccauucuugauggaccuggaaggcaagcaaggaaacuuuaagaaucugag
ggaauuuguguuuaagaauaucgacggauauuuuaagaucuauuccaagcauacucccauuaaucucguucgugaccuu
ccucaggguuucucugcauuggaaccccucguagauuugcccauugggauuaauaucacuagauuccagacgcugcuug
cacuccaucgaucuuaucugaccccuggugacuccucuuccggguggacgggggugcugcagccuacuacguuggcua
uuugcaaccuaggaccuuucuguugaaguauaaugagaaugggacuauuacugaugccguugauugcgcccucgauccg
cugucagaaacaaagugcacccugaagagcuucacaguagaaaagggaaucuaucaaaccucaaauuuccgcguucaacc
aacugaaucaaucgugcguuuuccuaacaucacaaaucuguguccguuuggagaaguauuuaaugcgacgcguuucgca
agcgucuacgcguggaaucgcaaacguaucucuaauugcguagcagauuauucugugcuguacaauagcgcaucuuucu
caacguuuaagugcuacggcguuaaugggaccaagcugaaugaucucuguuucacuaauguguacgcagacaguuuugu
aauuagaggagacgagguuaggcaaauagcaccgggucaaacuggcaaaaucgccgacuauaacuacaagcucccugaug
acuucacgggcugcguaauugcuuggaacucuaauaaccuggacucuaaagucggcgggaauuauaauuaucucuaucg
guuguuucgaaaauccaaucucaaacccuuugagcgggacaucaauacuacaauuuaucaagcugguaguacuccuugca
augggguagaaggcuucaauuguuauuucccccuucaaucuuacggauuucaacccacgaacggcguaggguaccagcc
cuaucgaguggugguacugucauucgaacuuaaucacgccccagcaacagucugcgggccuaagaaaagcacgaaucuug
ucaagaauaaguguguaaauuucaacuucaauggucuuacaggcacgggagugcucacugagucuaauaagaaauuucu
uccuuuccaacaauucggucgugauauugccgauacuacugaugcaguccgagauccacaaacucucgaaauccucgaua
uuacuccuuguaguuuuggcggcgucuccgugaucaccccagggaccaacacuaguaaccaaguggcggugcucuacca
agauguuaacugcacagaagucccgguagcgauccaugccgaccagcucacucccacauggcguguuuacagcacagggu
caaacguuuuccagacccgugccggaugucuuauaggagccgaacacguaaauaacaguuaugaaugcgauaucccaauu
ggugcagguaucugugcgucauaucaaacccaaacuaauucuccgagacgacgacggagcguugccucacaaucaauaau
cgccuacacaaugucccucggugccgaaaauucagucgcuuacucuaacaauagcauugcuaucccuaccaacuucacua
uuucuguuaccacggaaauuuugccuguauccaugaccaaaacaucuguugauugcacgauguacaucugcggggauuc
uaccgaauguucuaaccugcuucugcaauacggcuccuucugcacccaauugaaccgcgcacugacugggauugcugug
gaacaagacaagaauacucaagaaguauuugcccaggucaaacagauuuacaaaacucccccaauuaaagauuucggcgg
uuucaauuuuagucaaauucugccagauccaagucgacgccgcaggagcuuuauugaggaccugcucuuuaauaaaguc
acgcuggccgacgccggcuucauaaaacaguauggcgauugucuuggagacaucgccgcccgcgaccucauuugcgcaca
aaaguucaaugggcucaccguguugccaccacugcucacagaugagaugaucgcacaguacacgagcgcccuucuugccg
gcacuaucacgucugguuggacguucggugccggagccgcucugcaaauucccuuugcaaugcaaauggccuauagauu
uaauggaauuggcguaacacagaacguguuguacgagaaccagaagcucauugccaaccaguucaauuccgcuauuggca
aaauacaagacucucucagcucaacugcuagcgcacugggaaaauugcaagacguagucaaucaaaaugcccaagcccuca
auacucucgucaaacaguugucuuccaacuuuggggcuaucaguaguguacucaaugacauucuuucaagacuggaccc
gcccgaggcggaaguccaaauugaucgucugauaacuggaagguugcaaagccuucagaccuacguuacgcaacaacuua
uuagggcugccgaaauaagggcauccgcuaaucuggcagcuacaaagaugucugaauguguuuugggacagagcaaacg
gguugacuucugcgguaaagguuaccaucucaugucuuuuccacaaagcgcaccgcacggagucgucuuccugcaugua
acauacgucccagcccaagaaaagaauuuuaccacagccccagccaucugccacgacggcaaggcgcauuucccaagggaa
ggcguguuuguauccaacgggacgcauugguuugucacucaaaggaacuuuuacgaaccccaaauuauuaccacugaua
acaccuucguuucugggaacugugaugucgugauugggauaguaaacaacacgguauaugauccacugcaaccagaacu
ggauuccuucaaagaagagcuggacaaauacuucaagaaucauacuaguccugacgucgaccugggcgauaucaguggaa
ucaacgcuagcgucguaaacauucaaaaggagaucgauagacuuaacgaggucgccaagaaucucaaugaaagccucauc
gauuugcaagaacucggaaaauaugagcaauacauaaaauggccauggucuggcaggagaagacgcaggagagguagcg
gcggcagcggaucaggguacauuccggaagcccccagggacggacaggcauauguccgcaaggacggagaauggguucu
ucuuagcacuuuucugggguaau (SEQ ID NO: 141)
MDWTWILFLVAAATRVHSMFVFLVLLPLVSSQCVNLTTRTQLPPAYTNSFTRGVYY
PDKVFRSSVLHSTQDLFLPFFSNVTWFHAIHVSGTNGTKRFDNPVLPFNDGVYFASTE
KSNIIRGWIFGTTLDSKTQSLLIVNNATNVVIKVCEFQFCNDPFLGVYYHKNNKSWM
ESEFRVYSSANNCTFEYVSQPFLMDLEGKQGNFKNLREFVFKNIDGYFKIYSKHTPIN
LVRDLPQGFSALEPLVDLPIGINITRFQTLLALHRSYLTPGDSSSGWTAGAAAYYVGY
LQPRTFLLKYNENGTITDAVDCALDPLSETKCTLKSFTVEKGIYQTSNFRVQPTESIVR
FPNITNLCPFGEVFNATRFASVYAWNRKRISNCVADYSVLYNSASFSTFKCYGVNGT
KLNDLCFTNVYADSFVIRGDEVRQIAPGQTGKIADYNYKLPDDFTGCVIAWNSNNLD
SKVGGNYNYLYRLFRKSNLKPFERDINTTIYQAGSTPCNGVEGFNCYFPLQSYGFQPT
NGVGYQPYRVVVLSFELNHAPATVCGPKKSTNLVKNKCVNFNFNGLTGTGVLTESN
KKFLPFQQFGRDIADTTDAVRDPQTLEILDITPCSFGGVSVITPGTNTSNQVAVLYQD
VNCTEVPVAIHADQLTPTWRVYSTGSNVFQTRAGCLIGAEHVNNSYECDIPIGAGICA
SYQTQTNSPRRRRSVASQSIIAYTMSLGAENSVAYSNNSIAIPTNFTISVTTEILPVSMT
KTSVDCTMYICGDSTECSNLLLQYGSFCTQLNRALTGIAVEQDKNTQEVFAQVKQIY
KTPPIKDFGGFNFSQILPDPSRRRRSFIEDLLFNKVTLADAGFIKQYGDCLGDIAARDLI
CAQKFNGLTVLPPLLTDEMIAQYTSALLAGTITSGWTFGAGAALQIPFAMQMAYRFN
GIGVTQNVLYENQKLIANQFNSAIGKIQDSLSSTASALGKLQDVVNQNAQALNTLVK
QLSSNFGAISSVLNDILSRLDPPEAEVQIDRLITGRLQSLQTYVTQQLIRAAEIRASANL
AATKMSECVLGQSKRVDFCGKGYHLMSFPQSAPHGVVFLHVTYVPAQEKNFTTAPA
ICHDGKAHFPREGVFVSNGTHWFVTQRNFYEPQIITTDNTFVSGNCDVVIGIVNNTVY
DPLQPELDSFKEELDKYFKNHTSPDVDLGDISGINASVVNIQKEIDRLNEVAKNLNES
LIDLQELGKYEQYIKWPWSGRRRRRRGSGGSGSGYIPEAPRDGQAYVRKDGEWVLL
STFLG** (SEQ ID NO: 142)
WuS_3F_2P_NoClev_pVax
ggatccgccaccatggattggacgtggattctgtttctggtggccgcagcgacaagggtgcattcaatgtttgtgttcctggtcctgctgc
cactggtctcatcacagtgtgtaaacctgactacaagaacgcagcttccgcctgcctacacgaacagcttcaccaggggagtgtattat
cctgacaaagtctttaggagctctgttctccactccactcaagacctgtttctgcccttcttcagtaacgtgacttggtttcacgcaatacat
gtctccggcacaaatggaaccaaaagattcgataaccctgttctcccattcaatgatggagtatattttgctagcactgaaaagtctaacat
tattagaggctggatatttggcacgacattggactccaagacgcaaagtctcttgattgtgaacaacgcaacaaacgtggtgataaaagt
ttgcgaattccaattttgcaatgacccattcctgggagtttactaccacaagaataacaaaagctggatggaatccgagttccgggtttact
cctctgctaacaactgtacctttgagtatgtgagtcaaccattccttatggatctcgaaggaaaacaaggtaacttcaagaacctgaggg
agtttgtgtttaagaatatcgatggctattttaagatttatagcaaacacactccgattaatctggtgagagatctcccgcaaggattttctgc
tttggagccattggttgacttgcctattggaatcaacatcacccgttttcaaactctgcttgcgctgcatagatcctaccttacgcctggcga
ttcaagcagtggctggaccgcgggagcggccgcctattatgtaggctacttgcagcctcgcacctttctcctcaagtacaatgaaaacg
gcacaattacagacgcagtggattgtgctctggaccccctcagtgaaactaaatgtaccctgaaaagcttcactgttgagaaaggcatat
atcaaacctcaaactttagagtgcaacctactgaaagcattgtaagattccctaacattacaaacctgtgcccctttggcgaagtctttaat
gcaacccggtttgctagcgtgtatgcttggaaccgcaagaggatatccaattgcgtcgcagattattccgtcctgtataactctgccagct
ttagtaccttcaaatgttatggggtatctcccacaaaactcaatgatctttgtttcacaaatgtctatgctgactcctttgttatcagagggga
cgaagttcgccaaattgctccaggtcaaacaggaaagattgcagattataactacaagcttcccgacgattttacaggttgtgtgatagct
tggaactccaataatctggattccaaggtaggcgggaactacaattatctctacaggctcttccggaaatccaatctcaagccgttcgaa
agggatataagcactgagatctatcaagcaggcagtacaccctgtaacggagtagagggcttcaactgctactttccactgcaatcctat
gggtttcaaccgactaacggtgtcgggtaccaaccctatcgtgtcgtggtcctgtcctttgagcttctgcacgctcctgctaccgtttgcg
gccccaagaaaagcacgaatttggtcaagaacaaatgtgtcaactttaacttcaacggattgacagggaccggagtattgaccgaatct
aataagaaatttctgcccttccaacaattcggacgggacatagcagacacaaccgatgctgtcagggacccacagacacttgaaatac
tcgatatcaccccatgcagctttggcggagtctcagtcattacgcctggcaccaatacttccaatcaagttgcagtgctctatcaggatgt
caattgtactgaggtccccgtcgccatccacgcggatcaacttacccccacatggcgagtatatagtaccgggagcaacgtctttcaaa
cccgagcaggatgtctgataggtgccgaacacgtaaacaacagctacgaatgtgatatcccgatcggcgcagggatttgcgctagct
accaaacccaaactaattctccgcgccgccgcaggtccgtagcaagtcaatcaataatagcatacaccatgtcattgggagctgaaaa
cagcgtggcatatagcaacaattccatagctatccctacaaatttcacgatttctgttaccaccgaaattctgccagtgagcatgaccaaa
acctcagtggattgtacgatgtacatatgcggcgattccacggaatgttccaatctccttttgcaatacggcagcttttgtacccaactgaa
tagagctctgacgggtatagcagtagagcaggataagaacactcaagaggtgtttgcccaggtcaaacaaatttacaagactccccca
ataaaagactttggcggcttcaatttcagccaaatcttgccagacccttccaggcggcggcgctcatttatcgaagatttgcttttcaataa
agtcaccctggccgacgccggatttattaaacaatacggcgattgtctgggcgacatcgccgcaagggacctcatctgtgcgcaaaag
ttcaatggcctgacggtgcttccaccactcctgactgatgagatgattgcccaatacacatctgccctgctggctggtacaataacgagt
gggtggacctttggggctggagcagcattgcaaattccattcgccatgcaaatggcatatcgttttaacggcattggagtgactcaaaat
gtgctgtatgaaaaccaaaagcttattgcaaatcagtttaattccgccattggcaaaatccaggatagcctcagtagtacagcaagcgcc
ttggggaaactgcaagatgtggttaatcaaaatgcacaagctctcaataccctggtcaagcaacttagtagtaactttggtgccatcagc
agcgttctcaacgacatcctgagtcgtcttgatcccccagaggcagaggttcaaattgaccggcttatcactggaaggcttcaatccctg
caaacttacgtgactcagcaactgatacgcgctgcagaaattcgggcctcagcaaaccttgccgcgacaaagatgagcgaatgcgtg
ctgggacaatccaagcgggtcgacttttgtggtaaaggctatcatctgatgagcttcccacagtccgctccacacggcgtcgttttcctg
cacgtgacctatgtgccagcacaggagaagaactttacaacagccccggctatctgccacgatggcaaagctcactttcctagagagg
gagtgtttgtaagcaatggaacccattggttcgttacacaaagaaacttttatgagccgcaaattatcacaacagataatacattcgtctcc
gggaactgtgacgttgtgatagggattgtcaacaacacagtgtacgaccccctgcaacccgagctggattcatttaaagaagaactcg
acaagtacttcaagaatcatactagtccagatgtggatctgggcgatatatcaggaatcaatgccagcgtggtcaatattcaaaaggag
attgatagactgaacgaggttgccaagaatctgaatgaaagcctgatcgatctgcaagaattgggcaagtatgagcagtacattaaatg
gccctggtctggcgggagcggcggatctgggtctggatatattcccgaagctcctagagatggacaagcttacgtccgtaaagacgg
cgagtgggttcttctctccacattcctcggctgatga (SEQ ID NO: 143)
ggauccgccaccauggauuggacguggauucuguuucugguggccgcagcgacaagggugcauucaauguuuguguuc
cugguccugcugccacuggucucaucacaguguguaaaccugacuacaagaacgcagcuuccgccugccuacacgaacag
cuucaccaggggaguguauuauccugacaaagucuuuaggagcucuguucuccacuccacucaagaccuguuucugccc
uucuucaguaacgugacuugguuucacgcaauacaugucuccggcacaaauggaaccaaaagauucgauaacccuguucu
cccauucaaugauggaguauauuuugcuagcacugaaaagucuaacauuauuagaggcuggauauuuggcacgacauug
gacuccaagacgcaaagucucuugauugugaacaacgcaacaaacguggugauaaaaguuugcgaauuccaauuuugcaa
ugacccauuccugggaguuuacuaccacaagaauaacaaaagcuggauggaauccgaguuccggguuuacuccucugcu
aacaacuguaccuuugaguaugugagucaaccauuccuuauggaucucgaaggaaaacaagguaacuucaagaaccugag
ggaguuuguguuuaagaauaucgauggcuauuuuaagauuuauagcaaacacacuccgauuaaucuggugagagaucuc
ccgcaaggauuuucugcuuuggagccauugguugacuugccuauuggaaucaacaucacccguuuucaaacucugcuug
cgcugcauagauccuaccuuacgccuggcgauucaagcaguggcuggaccgcgggagcggccgccuauuauguaggcua
cuugcagccucgcaccuuucuccucaaguacaaugaaaacggcacaauuacagacgcaguggauugugcucuggaccccc
ucagugaaacuaaauguacccugaaaagcuucacuguugagaaaggcauauaucaaaccucaaacuuuagagugcaaccu
acugaaagcauuguaagauucccuaacauuacaaaccugugccccuuuggcgaagucuuuaaugcaacccgguuugcua
gcguguaugcuuggaaccgcaagaggauauccaauugcgucgcagauuauuccguccuguauaacucugccagcuuuag
uaccuucaaauguuaugggguaucucccacaaaacucaaugaucuuuguuucacaaaugucuaugcugacuccuuuguu
aucagaggggacgaaguucgccaaauugcuccaggucaaacaggaaagauugcagauuauaacuacaagcuucccgacga
uuuuacagguugugugauagcuuggaacuccaauaaucuggauuccaagguaggcgggaacuacaauuaucucuacagg
cucuuccggaaauccaaucucaagccguucgaaagggauauaagcacugagaucuaucaagcaggcaguacacccuguaa
cggaguagagggcuucaacugcuacuuuccacugcaauccuauggguuucaaccgacuaacggugucggguaccaaccc
uaucgugucgugguccuguccuuugagcuucugcacgcuccugcuaccguuugcggccccaagaaaagcacgaauuugg
ucaagaacaaaugugucaacuuuaacuucaacggauugacagggaccggaguauugaccgaaucuaauaagaaauuucug
cccuuccaacaauucggacgggacauagcagacacaaccgaugcugucagggacccacagacacuugaaauacucgauau
caccccaugcagcuuuggcggagucucagucauuacgccuggcaccaauacuuccaaucaaguugcagugcucuaucagg
augucaauuguacugagguccccgucgccauccacgcggaucaacuuacccccacauggcgaguauauaguaccgggagc
aacgucuuucaaacccgagcaggaugucugauaggugccgaacacguaaacaacagcuacgaaugugauaucccgaucgg
cgcagggauuugcgcuagcuaccaaacccaaacuaauucuccgcgccgccgcagguccguagcaagucaaucaauaauag
cauacaccaugucauugggagcugaaaacagcguggcauauagcaacaauuccauagcuaucccuacaaauuucacgauu
ucuguuaccaccgaaauucugccagugagcaugaccaaaaccucaguggauuguacgauguacauaugcggcgauuccac
ggaauguuccaaucuccuuuugcaauacggcagcuuuuguacccaacugaauagagcucugacggguauagcaguagag
caggauaagaacacucaagagguguuugcccaggucaaacaaauuuacaagacucccccaauaaaagacuuuggcggcuu
caauuucagccaaaucuugccagacccuuccaggcggcggcgcucauuuaucgaagauuugcuuuucaauaaagucaccc
uggccgacgccggauuuauuaaacaauacggcgauugucugggcgacaucgccgcaagggaccucaucugugcgcaaaa
guucaauggccugacggugcuuccaccacuccugacugaugagaugauugcccaauacacaucugcccugcuggcuggu
acaauaacgaguggguggaccuuuggggcuggagcagcauugcaaauuccauucgccaugcaaauggcauaucguuuua
acggcauuggagugacucaaaaugugcuguaugaaaaccaaaagcuuauugcaaaucaguuuaauuccgccauuggcaaa
auccaggauagccucaguaguacagcaagcgccuuggggaaacugcaagaugugguuaaucaaaaugcacaagcucucaa
uacccuggucaagcaacuuaguaguaacuuuggugccaucagcagcguucucaacgacauccugagucgucuugauccc
ccagaggcagagguucaaauugaccggcuuaucacuggaaggcuucaaucccugcaaacuuacgugacucagcaacugau
acgcgcugcagaaauucgggccucagcaaaccuugccgcgacaaagaugagcgaaugcgugcugggacaauccaagcggg
ucgacuuuugugguaaaggcuaucaucugaugagcuucccacaguccgcuccacacggcgucguuuuccugcacgugac
cuaugugccagcacaggagaagaacuuuacaacagccccggcuaucugccacgauggcaaagcucacuuuccuagagagg
gaguguuuguaagcaauggaacccauugguucguuacacaaagaaacuuuuaugagccgcaaauuaucacaacagauaau
acauucgucuccgggaacugugacguugugauagggauugucaacaacacaguguacgacccccugcaacccgagcugg
auucauuuaaagaagaacucgacaaguacuucaagaaucauacuaguccagauguggaucuggggauauaucaggaauc
aaugccagcguggucaauauucaaaaggagauugauagacugaacgagguugccaagaaucugaaugaaagccugaucg
aucugcaagaauugggcaaguaugagcaguacauuaaauggcccuggucuggcgggagcggcggaucugggucuggau
auauucccgaagcuccuagagauggacaagcuuacguccguaaagacggcgaguggguucuucucuccacauuccucgg
cugauga (SEQ ID NO: 144)
MDWTWILFLVAAATRVHSMFVFLVLLPLVSSQCVNLTTRTQLPPAYTNSFTRGVYY
PDKVFRSSVLHSTQDLFLPFFSNVTWFHAIHVSGTNGTKRFDNPVLPFNDGVYFASTE
KSNIIRGWIFGTTLDSKTQSLLIVNNATNVVIKVCEFQFCNDPFLGVYYHKNNKSWM
ESEFRVYSSANNCTFEYVSQPFLMDLEGKQGNFKNLREFVFKNIDGYFKIYSKHTPIN
LVRDLPQGFSALEPLVDLPIGINITRFQTLLALHRSYLTPGDSSSGWTAGAAAYYVGY
LQPRTFLLKYNENGTITDAVDCALDPLSETKCTLKSFTVEKGIYQTSNFRVQPTESIVR
FPNITNLCPFGEVFNATRFASVYAWNRKRISNCVADYSVLYNSASFSTFKCYGVSPTK
LNDLCFTNVYADSFVIRGDEVRQIAPGQTGKIADYNYKLPDDFTGCVIAWNSNNLDS
KVGGNYNYLYRLFRKSNLKPFERDISTEIYQAGSTPCNGVEGFNCYFPLQSYGFQPTN
GVGYQPYRVVVLSFELLHAPATVCGPKKSTNLVKNKCVNFNFNGLTGTGVLTESNK
KFLPFQQFGRDIADTTDAVRDPQTLEILDITPCSFGGVSVITPGTNTSNQVAVLYQDV
NCTEVPVAIHADQLTPTWRVYSTGSNVFQTRAGCLIGAEHVNNSYECDIPIGAGICAS
YQTQTNSPRRRRSVASQSIIAYTMSLGAENSVAYSNNSIAIPTNFTISVTTEILPVSMTK
TSVDCTMYICGDSTECSNLLLQYGSFCTQLNRALTGIAVEQDKNTQEVFAQVKQIYK
TPPIKDFGGFNFSQILPDPSRRRRSFIEDLLFNKVTLADAGFIKQYGDCLGDIAARDLIC
AQKFNGLTVLPPLLTDEMIAQYTSALLAGTITSGWTFGAGAALQIPFAMQMAYRFNG
IGVTQNVLYENQKLIANQFNSAIGKIQDSLSSTASALGKLQDVVNQNAQALNTLVKQ
LSSNFGAISSVLNDILSRLDPPEAEVQIDRLITGRLQSLQTYVTQQLIRAAEIRASANLA
ATKMSECVLGQSKRVDFCGKGYHLMSFPQSAPHGVVFLHVTYVPAQEKNFTTAPAI
CHDGKAHFPREGVFVSNGTHWFVTQRNFYEPQIITTDNTFVSGNCDVVIGIVNNTVY
DPLQPELDSFKEELDKYFKNHTSPDVDLGDISGINASVVNIQKEIDRLNEVAKNLNES
LIDLQELGKYEQYIKWPWSGGSGGSGSGYIPEAPRDGQAYVRKDGEWVLLSTFLG**
(SEQ ID NO: 145)
WuS_3F_2P_pVax
ggatccgccaccatggattggacctggattctctttcttgtggcggcggcaacacgcgtccacagcatgttcgtctttctggtattgctgc
cgcttgtgagtagccagtgtgtgaacttgactaccaggacccagctcccaccggcttataccaattccttcacaagaggtgtctactatc
cagataaagttttccgcagctcagtgttgcatagcacacaggatctctttctgccattcttcagcaacgtcacgtggtttcatgcgatacac
gttagtggaacaaacggaacaaaacgcttcgacaaccctgttctgccattcaatgacggagtttactttgcgagtaccgagaaatctaac
atcattagagggtggatctttgggactacattggattctaaaacccagtcactcctcatagtcaataacgctacaaatgtggtgattaaggt
atgcgaatttcagttttgcaacgacccatttctcggtgtatattatcacaagaataataaaagttggatggagtccgagttccgcgtctattc
atcagccaataattgtactttcgaatatgtttctcaaccgtttctcatggatctcgaaggaaagcaagggaattttaagaatctccgggagtt
tgtcttcaagaacatagatggctattttaaaatttactcaaagcatactcctattaacctcgttcgggatctcccccagggttttagcgccct
ggagccactggttgatctgccaattgggattaatatcacacgctttcaaactctcctggcccttcacagatcttacttgaccccaggtgatt
caagtagtggttggacagctggagctgctgcatattatgtaggttatctccaaccccgcacctttctcctcaaatataacgagaacggca
ccattacagatgcggtggactgtgccttggaccctctttctgagaccaagtgcacactcaaaagcttcactgtcgaaaaggggatttacc
agacatcaaattttagagttcaacccaccgaaagcattgtgagatttcctaacattacaaacttgtgcccatttggggaagtctttaacgct
acacgctttgctagcgtctatgcttggaaccgaaaacggattagtaactgcgtagctgattattccgtcttgtacaacagcgcatcttttag
cactttcaagtgttatggagtaagcccaacaaagctcaacgacctttgttttactaacgtctatgctgattcattcgtgattcgtggggatga
ggttcgtcagatcgccccaggccaaaccgggaaaatcgctgattataattataaattgcctgacgattttaccggctgtgtaatcgcctg
gaattccaacaatcttgattccaaggttggcggcaactacaactatctctaccgtctgtttcgcaaatccaatctcaagcccttcgaacgc
gatatttcaactgaaatctatcaggcagggtccactccgtgtaacggcgtagaaggatttaattgttacttcccattgcaaagttatggcttt
caacccaccaacggagtcgggtaccaaccatacagagtcgtcgtgctctcatttgagctccttcatgcacctgccacggtgtgcggcc
caaagaaatcaacgaaccttgtgaagaataaatgtgtcaattttaactttaatggcctgacagggactggcgtcctcacagaatctaataa
gaagtttctccctttccagcaatttggtcgcgatatagctgataccacagatgcagttagagacccacagacacttgagattctcgatatta
ccccgtgctcctttggcggcgtgtccgtcattactcccggtaccaatacgtctaaccaggtagcagtgctctaccaagatgtaaattgtac
tgaggtacccgtggcaatccatgccgaccaactgactccaacgtgggggtttattcaaccggaagcaacgtgtttcaaacacgggct
ggctgccttataggcgctgagcacgtgaataatagttacgagtgtgatatcccgatcggagccggcatctgtgcatcttatcaaacacaa
acaaactccccgcgccggcggagaagcgtggctagccaaagtataatcgcttatacaatgtccttgggcgcggaaaattcagtggctt
attccaataattcaattgccattcctaccaactttacaattagcgtgaccacagaaatcttgcctgtgtctatgaccaagaccagcgtcgatt
gcaccatgtatatctgtggagatagcaccgagtgttcaaatttgctcctgcaatacggttccttttgtacacagcttaaccgcgccctcaca
ggtattgctgttgaacaagacaagaatactcaagaggtatttgctcaggtaaaacaaatttataagaccccaccgataaaagattttggc
ggtttcaatttctcccaaatattgccagatcctagtaggcgtcgtagatcatttatcgaggatctcctgttcaataaagtaaccctcgccgac
gctggtttcatcaaacaatatggcgactgcctgggagatattgcagctagggatttgatttgtgcacagaagttcaatggactcaccgttc
tcccgcctctcctgacagatgagatgattgcacaatacacctctgctcttttggccgggaccattacgagcggttggacttttggcgcgg
gtgcggctctccaaattcctttcgcgatgcaaatggcgtatagatttaatggaattggcgttactcaaaacgtcttgtacgagaatcagaa
actgatcgccaaccaatttaacagtgcaattggcaaaatccaagatagccttagttctactgcttcagcattgggtaagttgcaagatgtg
gtcaaccaaaacgcacaagcactcaataccctcgtgaagcaattgtccagcaattttggagctatctcaagtgtgctcaacgacatccttt
ctaggcttgatccacccgaggcagaggttcaaatcgacagactgataactggcaggctccaatctctgcaaacgtacgtgacacagca
actgattagggctgctgagatcagggcgtccgcgaatttggcagcaaccaaaatgagcgaatgcgtgctgggacaatcaaagagagt
tgatttctgtggaaagggttaccatctcatgtccttccctcaatcagctccccatggagttgtgtttctgcacgttacttacgtgccggcaca
agaaaagaatttcaccactgcaccggctatatgtcatgatgggaaagcccacttcccgcgggaaggcgttttcgtgtccaacgggact
cattggttcgtcacacaaaggaacttctatgagccacaaataattacaacagacaacacctttgtctctgggaactgcgatgtcgtgattg
gaatcgtgaacaacactgtctacgatccgctgcaacccgaactcgactcattcaaagaggaactggataagtatttcaagaaccatacc
agccccgatgtcgatctgggcgatatctccgggataaatgcttcagtagtaaacattcaaaaggaaatcgaccggctgaacgaggttg
cgaagaatcttaatgagtcattgatcgacctgcaagaacttggtaagtatgagcagtacatcaagtggccttggtcaggccgcaggcgt
cggcgtcgtgggagcggcggcagtgggagcggatatattccagaagcgccccgagacggacaagcttacgtacgaaaagacgga
gaatgggtactgctttccacttttcttggctaatga (SEQ ID NO: 146)
ggauccgccaccauggauuggaccuggauucucuuucuuguggcggcggcaacacgcguccacagcauguucgucuuuc
ugguauugcugccgcuugugaguagccagugugugaacuugacuaccaggacccagcucccaccggcuuauaccaauuc
cuucacaagaggugucuacuauccagauaaaguuuuccgcagcucaguguugcauagcacacaggaucucuuucugcca
uucuucagaacgucacgugguuucaugcgauacacguuaguggaacaaacggaacaaaacgcuucgacaacccuguucu
gccauucaaugacggaguuuacuuugcgaguaccgagaaaucuaacaucauuagaggguggaucuuugggacuacauug
gauucuaaaacccagucacuccucauagucaauaacgcuacaaauguggugauuaagguaugcgaauuucaguuuugca
acgacccauuucucgguguauauuaucacaagaauaauaaaaguuggauggaguccgaguuccgcgucuauucaucagc
caauaauuguacuuucgaauauguuucucaaccguuucucauggaucucgaaggaaagcaagggaauuuuaagaaucuc
cgggaguuugucuucaagaacauagauggcuauuuuaaaauuuacucaaagcauacuccuauuaaccucguucgggauc
ucccccaggguuuuagcgcccuggagccacugguugaucugccaauugggauuaauaucacacgcuuucaaacucuccu
ggcccuucacagaucuuacuugaccccaggugauucaaguagugguuggacagcuggagcugcugcauauuauguaggu
uaucuccaaccccgcaccuuucuccucaaauauaacgagaacggcaccauuacagaugcgguggacugugccuuggaccc
ucuuucugagaccaagugcacacucaaaagcuucacugucgaaaaggggauuuaccagacaucaaauuuuagaguucaac
ccaccgaaagcauugugagauuuccuaacauuacaaacuugugcccauuuggggaagucuuuaacgcuacacgcuuugc
uagcgucuaugcuuggaaccgaaaacggauuaguaacugcguagcugauuauuccgucuuguacaacagcgcaucuuuu
agcacuuucaaguguuauggaguaagcccaacaaagcucaacgaccuuuguuuuacuaacgucuaugcugauucauucg
ugauucguggggaugagguucgucagaucgccccaggccaaaccgggaaaaucgcugauuauaauuauaaauugccuga
cgauuuuaccggcuguguaaucgccuggaauuccaacaaucuugauuccaagguuggcggcaacuacaacuaucucuac
cgucuguuucgcaaauccaaucucaagcccuucgaacgcgauauuucaacugaaaucuaucaggcaggguccacuccgug
uaacggcguagaaggauuuaauuguuacuucccauugcaaaguuauggcuuucaacccaccaacggagucggguaccaa
ccauacagagucgucgugcucucauuugagcuccuucaugcaccugccacggugugcggcccaaagaaaucaacgaaccu
ugugaagaauaaaugugucaauuuuaacuuuaauggccugacagggacuggcguccucacagaaucuaauaagaaguuu
cucccuuuccagcaauuuggucgcgauauagcugauaccacagaugcaguuagagacccacagacacuugagauucucga
uauuaccccgugcuccuuuggcggcguguccgucauuacucccgguaccaauacgucuaaccagguagcagugcucuac
caagauguaaauuguacugagguacccguggcaauccaugccgaccaacugacuccaacguggcggguuuauucaaccg
gaagcaacguguuucaaacacgggcuggcugccuuauaggcgcugagcacgugaauaauaguuacgagugugauauccc
gaucggagccggcaucugugcaucuuaucaaacacaaacaaacuccccgcgccggcggagaagcguggcuagccaaagua
uaaucgcuuauacaauguccuugggcgcggaaaauucaguggcuuauuccaauaauucaauugccauuccuaccaacuu
uacaauuagcgugaccacagaaaucuugccugugucuaugaccaagaccagcgucgauugcaccauguauaucugugga
gauagcaccgaguguucaaauuugcuccugcaauacgguuccuuuuguacacagcuuaaccgcgcccucacagguauug
cuguugaacaagacaagaauacucaagagguauuugcucagguaaaacaaauuuauaagaccccaccgauaaaagauuuu
ggcgguuucaauuucucccaaauauugccagauccuaguaggcgucguagaucauuuaucgaggaucuccuguucaaua
aaguaacccucgccgacgcugguuucaucaaacaauauggcgacugccugggagauauugcagcuagggauuugauuug
ugcacagaaguucaauggacucaccguucucccgccucuccugacagaugagaugauugcacaauacaccucugcucuuu
uggccgggaccauuacgagcgguuggacuuuuggcgcgggugcggcucuccaaauuccuuucgcgaugcaaauggcgu
auagauuuaauggaauuggcguuacucaaaacgucuuguacgagaaucagaaacugaucgccaaccaauuuaacagugca
auuggcaaaauccaagauagccuuaguucuacugcuucagcauuggguaaguugcaagauguggucaaccaaaacgcaca
agcacucaauacccucgugaagcaauuguccagcaauuuuggagcuaucucaagugugcucaacgacauccuuucuaggc
uugauccacccgaggcagagguucaaaucgacagacugauaacuggcaggcuccaaucucugcaaacguacgugacacag
caacugauuagggcugcugagaucagggcguccgcgaauuuggcagcaaccaaaaugagcgaaugcgugcugggacaau
caaagagaguugauuucuguggaaaggguuaccaucucauguccuucccucaaucagcuccccauggaguuguguuucu
gcacguuacuuacgugccggcacaagaaaagaauuucaccacugcaccggcuauaugucaugaugggaaagcccacuucc
cgcgggaaggcguuuucguguccaacgggacucauugguucgucacacaaaggaacuucuaugagccacaaauaauuac
aacagacaacaccuuugucucugggaacugcgaugucgugauuggaaucgugaacaacacugucuacgauccgcugcaac
ccgaacucgacucauucaaagaggaacuggauaaguauuucaagaaccauaccagccccgaugucgaucugggcgauauc
uccgggauaaaugcuucaguaguaaacauucaaaaggaaaucgaccggcugaacgagguugcgaagaaucuuaaugagu
cauugaucgaccugcaagaacuugguaaguaugagcaguacaucaaguggccuuggucaggccgcaggcgucggcgucg
ugggagcggcggcagugggagcggauauauuccagaagcgccccgagacggacaagcuuacguacgaaaagacggagaa
uggguacugcuuuccacuuuucuuggcuaaug (SEQ ID NO: 147)
MDWTWILFLVAAATRVHSMFVFLVLLPLVSSQCVNLTTRTQLPPAYTNSFTRGVYY
PDKVFRSSVLHSTQDLFLPFFSNVTWFHAIHVSGTNGTKRFDNPVLPFNDGVYFASTE
KSNIIRGWIFGTTLDSKTQSLLIVNNATNVVIKVCEFQFCNDPFLGVYYHKNNKSWM
ESEFRVYSSANNCTFEYVSQPFLMDLEGKQGNFKNLREFVFKNIDGYFKIYSKHTPIN
LVRDLPQGFSALEPLVDLPIGINITRFQTLLALHRSYLTPGDSSSGWTAGAAAYYVGY
LQPRTFLLKYNENGTITDAVDCALDPLSETKCTLKSFTVEKGIYQTSNFRVQPTESIVR
FPNITNLCPFGEVFNATRFASVYAWNRKRISNCVADYSVLYNSASFSTFKCYGVSPTK
LNDLCFTNVYADSFVIRGDEVRQIAPGQTGKIADYNYKLPDDFTGCVIAWNSNNLDS
KVGGNYNYLYRLFRKSNLKPFERDISTEIYQAGSTPCNGVEGFNCYFPLQSYGFQPTN
GVGYQPYRVVVLSFELLHAPATVCGPKKSTNLVKNKCVNFNFNGLTGTGVLTESNK
KFLPFQQFGRDIADTTDAVRDPQTLEILDITPCSFGGVSVITPGTNTSNQVAVLYQDV
NCTEVPVAIHADQLTPTWRVYSTGSNVFQTRAGCLIGAEHVNNSYECDIPIGAGICAS
YQTQTNSPRRRRSVASQSIIAYTMSLGAENSVAYSNNSIAIPTNFTISVTTEILPVSMTK
TSVDCTMYICGDSTECSNLLLQYGSFCTQLNRALTGIAVEQDKNTQEVFAQVKQIYK
TPPIKDFGGFNFSQILPDPSRRRRSFIEDLLFNKVTLADAGFIKQYGDCLGDIAARDLIC
AQKFNGLTVLPPLLTDEMIAQYTSALLAGTITSGWTFGAGAALQIPFAMQMAYRFNG
IGVTQNVLYENQKLIANQFNSAIGKIQDSLSSTASALGKLQDVVNQNAQALNTLVKQ
LSSNFGAISSVLNDILSRLDPPEAEVQIDRLITGRLQSLQTYVTQQLIRAAEIRASANLA
ATKMSECVLGQSKRVDFCGKGYHLMSFPQSAPHGVVFLHVTYVPAQEKNFTTAPAI
CHDGKAHFPREGVFVSNGTHWFVTQRNFYEPQIITTDNTFVSGNCDVVIGIVNNTVY
DPLQPELDSFKEELDKYFKNHTSPDVDLGDISGINASVVNIQKEIDRLNEVAKNLNES
LIDLQELGKYEQYIKWPWSGRRRRRRGSGGSGSGYIPEAPRDGQAYVRKDGEWVLL
STFLG** (SEQ ID NO: 148)
WuS_3F_D2P_GlyDSol_pVax
ggatccgccaccatggattggacctggatcttgtttctcgtcgcagctgccacaagagtccacagtatgtttgtatttctcgttctcctgcct
cttgtgtcctctcagtgtgtgaatctgacgaccagaactcagctcccacccgcatacactaacagtatcacgaggggcgtttattaccca
gacaaggttttccgaagcagttgtctgtatagtacacaggatttgttcctgccattctttagtaacgtgacttggtttcatgcgatccacgttt
ctggcacaaacggtaccaaaagattcgataaccccgtgctgcctttcaatgacggcgtgtatttcgcttctactgaaaagtccggcatca
tccggggatggatcttcggcactactttggatagcaaaacccaatccctgctgattgtgaataatgcaaccaacgtggtgatcaaagtct
gtgagtttcaattctgtaatgacccatttctgggcgtttactaccacaagaacaacaaaagttggatggagtccgaatttcgcgtctactca
tccgcgaacaattgcacatttgagtatgtgagtcaaccattcttgatggatcttgaagggaagcaaggcaatttcaagaacctgcggga
gtttgtatttaagaacattgacggctatttcaagatatattctaaacatactcccattaacctcgtgcgcgacttgccccagggattcagtgc
tctggaaccactggtcgatctccccatcggcattaatattacacgctttcaaactctcctcgctttgcatcggtcctatcttactccgggaga
tagctcaagcggatggacggcaggcgcggcggcatattatgttggatatctccaaccacgcacgttccttctgaaatataatgaaaatg
gcactattactgatgcagtcgactgcgccctggaccctctgtctgagaccaagtgtaccctgaagtcattcaccgttgagaagggaatct
accaaacctctaactttagggtacaacctactgagagcattgtccgcttcccgaatatcaccaatctttgtccgtttggtgaggtgtttaac
gcgacacgatttgcttccgtatacgcctggaatcgcaaacgcatcagcaactgtgtggctgattactcatttctctataattccgcttccttc
tctactttcaagtgttatggggtgaatgggactaaacttaatgacttgtgctttactaacgtgtatgctgatagcttcgtcattcgtggagatg
aggtcaggcaaatagctcccggacaaacagggaagatagcggactataactacaaactgcctgatgatttcaccgggtgcgtcatcg
cgtggaacagcaataacctcgatagcaaggttggcggaaactataattatctctatcgtttgtttaggaaaagcaatctcaagcccttcga
gcgggatattaatacaacgatatatcaagctggctctaccccgtgcaacggagtagagggcttcaattgctactttcctttgcagtcctac
ggattccaacccaccaacggagtgggctaccaaccataccgtgtcgtggttttgagtttcgaactgaaccacgcaccagcaacagtct
gcggaccgaagaagagtacaaaccttgtgaagaataagtgcgtgaactttaatttcaatggcctgactggaaccggagttctgacgga
atccaataagaaatttctgccgtttcagcaatttggacgggattgtgctggaacgactgatgccgtacgtgatcctcaaacactggaaatc
ctggacataaccccttgttcctttggtggcgtaagcgttattactccaggcacaaacacatcaaatcaagtcgccgtactgtatcaaggtg
tcaactgtactgaagtacctgtagccattcatgcaggacaactgacccctacatggcgagtgtattcaacgggaagcaacgtatttcaaa
ccagggccggctgtctcatcggagcagagcatgtcaataatagttatgaatgcgacatcccaataggtgctgggatctgcgcgagcta
ccaaacccaaactaatagcccacgaagacggagatctgtcgcgtcccaaagcattattgcgtacacgatgagcctctgtgcagaaaat
tcagttgcctacagcaacaatagcatcgctattccaaccaatttcactatcagctgtacaacagaaattctcccagtctccatgacgaaga
catcctgcgattgtacaatgtatatatgcggcgactcaacagaatgttcaaatttgttgctgcaatacgggtccttctgcacccaactcaat
cgagctcttacaggcatagcggtcgaacaagacaagaacacacaagaagtgtttgcccaagttaaacagtgttacaagacaccaccta
tcaaagatttcggcggttttaacttttctcagatcttgccagacccatctaggcggcggcgatcctttatcgaggaccttctcttcaataagg
taactcttgcagacgctggatttattaagcaatacggcgactgtctcggggatatcgccgctagggatctgatctgtgcccagaaatttaa
cggctgcacggtgctgccccctctgctgactgatgaaatgatagcacaatatacttctgcattgctggccggtaccattacatcaggatg
gacatttggtgccggggggcgctccaaattcccttcgccatgcaaatggcctataggtttaacggcatcggggtgacccaaaacgtc
ctctatgagaatcaaaagctgattgctaaccagtttaactcagcaataggaaagattcaagactctctgtcaagtaccgcatccgcccttg
gaaagctccaagacgttgttaaccagaatgcacaagctctcaacacgctcgtgaaacaactctcttcaaattttggtgcgatctcttctgg
cccaaatgacattttgagccggcttcccaaggtagaagctgaagtacaaattgatcgcctgatcaccggacggctccaaagtctgcag
acgtacgtcacccagcaactgatacgggcagcggagatccgggcttctgccaacctggccgccacgaagatgagcgaatgcgtgct
cggacagtccaaaagagtagatttctgtggcaagggctatcatctcatgtcctttccccaatccgcccctcacggagttgtcttccttcatt
gcacttacgtccccgctcaagaaaagaattttactacggcacctgctatctgtcacgacgggaaagcccattttcctagagaaggtgtgt
ttgtatctaacggcacgcactggttcgtcacgcaacgtaacttttacgagccccagatcatcaccacagacaatacggatgtatcaggta
attgtgatgtcctgattggtatcgtcaataacactgtatacgatcctttgcaaccggaactggactcctttaaagaggaacttgataagtatt
tcaagaatcacacttccccagatgtcgatctcggggacatctcaggaattaatgcatcagtggtcaatattcaaaaggaaattgatcgctt
gaatgaggttgcaaagaatttgaatgaaagccttatcgaccttcaagagctgggcaaatatgagcagtacattaaatggccttggagcg
gtcgccggcgccgaaggcggggttccggcggtagcggtagcggttatattccagaagctcctcgcgatgggcaggcttatgtgagg
aaagatggtgaatgggtccttttgtccacgttcctcgggtagtaa (SEQ ID NO: 149)
ggauccgccaccauggauuggaccuggaucuuguuucucgucgcagcugccacaagaguccacaguauguuuguauuuc
ucguucuccugccucuuguguccucucagugugugaaucugacgaccagaacucagcucccacccgcauacacuaacagu
aucacgaggggcguuuauuacccagacaagguuuuccgaagcaguugucuguauaguacacaggauuuguuccugccau
ucuuuaguaacgugacuugguuucaugcgauccacguuucuggcacaaacgguaccaaaagauucgauaaccccgugcu
gccuuucaaugacggcguguauuucgcuucuacugaaaaguccggcaucauccggggauggaucuucggcacuacuuug
gauagcaaaacccaaucccugcugauugugaauaaugcaaccaacguggugaucaaagucugugaguuucaauucugua
augacccauuucugggcguuuacuaccacaagaacaacaaaaguuggauggaguccgaauuucgcgucuacucauccgcg
aacaauugcacauuugaguaugugagucaaccauucuugauggaucuugaagggaagcaaggcaauuucaagaaccugc
gggaguuuguauuuaagaacauugacggcuauuucaagauauauucuaaacauacucccauuaaccucgugcgcgacuu
gccccagggauucagugcucuggaaccacuggucgaucuccccaucggcauuaauauuacacgcuuucaaacucuccucg
cuuugcaucgguccuaucuuacuccgggagauagcucaagcggauggacggcaggcgcggcggcauauuauguuggaua
ucuccaaccacgcacguuccuucugaaauauaaugaaaauggcacuauuacugaugcagucgacugcgcccuggacccuc
ugucugagaccaaguguacccugaagucauucaccguugagaagggaaucuaccaaaccucuaacuuuaggguacaaccu
acugagagcauuguccgcuucccgaauaucaccaaucuuuguccguuuggugagguguuuaacgcgacacgauuugcuu
ccguauacgccuggaaucgcaaacgcaucagcaacuguguggcugauuacucauuucucuauaauuccgcuuccuucuc
uacuuucaaguguuauggggugaaugggacuaaacuuaaugacuugugcuuuacuaacguguaugcugauagcuucgu
cauucguggagaugaggucaggcaaauagcucccggacaaacagggaagauagcggacuauaacuacaaacugccugaug
auuucaccgggugcgucaucgcguggaacagcaauaaccucgauagcaagguuggcggaaacuauaauuaucucuaucg
uuuguuuaggaaaagcaaucucaagcccuucgagcgggauauuaauacaacgauauaucaagcuggcucuaccccgugca
acggaguagagggcuucaauugcuacuuuccuuugcaguccuacggauuccaacccaccaacggagugggcuaccaacca
uaccgugucgugguuuugaguuucgaacugaaccacgcaccagcaacagucugcggaccgaagaagaguacaaaccuug
ugaagaauaagugcgugaacuuuaauuucaauggccugacuggaaccggaguucugacggaauccaauaagaaauuucu
gccguuucagcaauuuggacgggauugugcuggaacgacugaugccguacgugauccucaaacacuggaaauccuggac
auaaccccuuguuccuuugguggcguaagcguuauuacuccaggcacaaacacaucaaaucaagucgccguacuguauca
aggugucaacuguacugaaguaccuguagccauucaugcaggacaacugaccccuacauggcgaguguauucaacggga
agcaacguauuucaaaccagggccggcugucucaucggagcagagcaugucaauaauaguuaugaaugcgacaucccaau
aggugcugggaucugcgcgagcuaccaaacccaaacuaauagcccacgaagacggagaucugucgcgucccaaagcauua
uugcguacacgaugagccucugugcagaaaauucaguugccuacagcaacaauagcaucgcuauuccaaccaauuucacu
aucagcuguacaacagaaauucucccagucuccaugacgaagacauccugcgauuguacaauguauauaugcggcgacuc
aacagaauguucaaauuuguugcugcaauacggguccuucugcacccaacucaaucgagcucuuacaggcauagcgguc
gaacaagacaagaacacacaagaaguguuugcccaaguuaaacaguguuacaagacaccaccuaucaaagauuucggcgg
uuuuaacuuuucucagaucuugccagacccaucuaggcggcggcgauccuuuaucgaggaccuucucuucaauaaggua
acucuugcagacgcuggauuuauuaagcaauacggcgacugucucggggauaucgccgcuagggaucugaucugugccc
agaaauuuaacggcugcacggugcugcccccucugcugacugaugaaaugauagcacaauauacuucugcauugcuggc
cgguaccauuacaucaggauggacauuuggugccggggcggcgcuccaaauucccuucgccaugcaaauggccuauagg
uuuaacggcaucggggugacccaaaacguccucuaugagaaucaaaagcugauugcuaaccaguuuaacucagcaauagg
aaagauucaagacucucugucaaguaccgcauccgcccuuggaaagcuccaagacguuguuaaccagaaugcacaagcuc
ucaacacgcucgugaaacaacucucuucaaauuuuggugcgaucucuucuggcccaaaugacauuuugagccggcuucc
caagguagaagcugaaguacaaauugaucgccugaucaccggacggcuccaaagucugcagacguacgucacccagcaac
ugauacgggcagcggagauccgggcuucugccaaccuggccgccacgaagaugagcgaaugcgugcucggacaguccaa
aagaguagauuucuguggcaagggcuaucaucucauguccuuuccccaauccgccccucacggaguugucuuccuucau
ugcacuuacguccccgcucaagaaaagaauuuuacuacggcaccugcuaucugucacgacgggaaagcccauuuuccuag
agaagguguguuuguaucuaacggcacgcacugguucgucacgcaacguaacuuuuacgagccccagaucaucaccacag
acaauacggauguaucagguaauugugauguccugauugguaucgucaauaacacuguauacgauccuuugcaaccgga
acuggacuccuuuaaagaggaacuugauaaguauuucaagaaucacacuuccccagaugucgaucucggggacaucucag
gaauuaaugcaucaguggucaauauucaaaaggaaauugaucgcuugaaugagguugcaaagaauuugaaugaaagccu
uaucgaccuucaagagcugggcaaauaugagcaguacauuaaauggccuuggagcggucgccggcgccgaaggcggggu
uccggcgguagcgguagcgguuauauuccagaagcuccucgcgaugggcaggcuuaugugaggaaagauggugaaugg
guccuuuuguccacguuccucggguaguaa (SEQ ID NO: 150)
MDWTWILFLVAAATRVHSMFVFLVLLPLVSSQCVNLTTRTQLPPAYTNSITRGVYYP
DKVFRSSCLYSTQDLFLPFFSNVTWFHAIHVSGTNGTKRFDNPVLPFNDGVYFASTEK
SGIIRGWIFGTTLDSKTQSLLIVNNATNVVIKVCEFQFCNDPFLGVYYHKNNKSWMES
EFRVYSSANNCTFEYVSQPFLMDLEGKQGNFKNLREFVFKNIDGYFKIYSKHTPINLV
RDLPQGFSALEPLVDLPIGINITRFQTLLALHRSYLTPGDSSSGWTAGAAAYYVGYLQ
PRTFLLKYNENGTITDAVDCALDPLSETKCTLKSFTVEKGIYQTSNFRVQPTESIVRFP
NITNLCPFGEVFNATRFASVYAWNRKRISNCVADYSFLYNSASFSTFKCYGVNGTKL
NDLCFTNVYADSFVIRGDEVRQIAPGQTGKIADYNYKLPDDFTGCVIAWNSNNLDSK
VGGNYNYLYRLFRKSNLKPFERDINTTIYQAGSTPCNGVEGFNCYFPLQSYGFQPTN
GVGYQPYRVVVLSFELNHAPATVCGPKKSTNLVKNKCVNFNFNGLTGTGVLTESNK
KFLPFQQFGRDCAGTTDAVRDPQTLEILDITPCSFGGVSVITPGTNTSNQVAVLYQGV
NCTEVPVAIHAGQLTPTWRVYSTGSNVFQTRAGCLIGAEHVNNSYECDIPIGAGICAS
YQTQTNSPRRRRSVASQSIIAYTMSLCAENSVAYSNNSIAIPTNFTISCTTEILPVSMTK
TSCDCTMYICGDSTECSNLLLQYGSFCTQLNRALTGIAVEQDKNTQEVFAQVKQCYK
TPPIKDFGGFNFSQILPDPSRRRRSFIEDLLFNKVTLADAGFIKQYGDCLGDIAARDLIC
AQKFNGCTVLPPLLTDEMIAQYTSALLAGTITSGWTFGAGAALQIPFAMQMAYRFN
GIGVTQNVLYENQKLIANQFNSAIGKIQDSLSSTASALGKLQDVVNQNAQALNTLVK
QLSSNFGAISSGPNDILSRLPKVEAEVQIDRLITGRLQSLQTYVTQQLIRAAEIRASANL
AATKMSECVLGQSKRVDFCGKGYHLMSFPQSAPHGVVFLHCTYVPAQEKNFTTAPA
ICHDGKAHFPREGVFVSNGTHWFVTQRNFYEPQIITTDNTDVSGNCDVLIGIVNNTVY
DPLQPELDSFKEELDKYFKNHTSPDVDLGDISGINASVVNIQKEIDRLNEVAKNLNES
LIDLQELGKYEQYIKWPWSGRRRRRRGSGGSGSGYIPEAPRDGQAYVRKDGEWVLL
STFLG** (SEQ ID NO: 151)
WuS_3F_D2P_GlyD3_pVax
ggatccgccaccatggactggacatggatacttttcttggtagcggcggcgacacgcgtgcactccatgtttgttttcctcgtcctgctcc
cacttgtctcaagtcaatgcgttaacctgactacgaggacgcagctcccgcccgcctacacaaactcttttacccggggtgtgtactacc
ccgacaaagttttccgcagttcatgtctccactcaacacaggacctctttctgccattcttctcaaatgtcacatggtttcacgccatccacg
tttccggcactaacggtaccaaacggttcgacaaccctgttctgccattcaatgatggggtgtattttgcgagcacagagaagtccaatat
aatcagaggttggatcttcggtacaacgctggacagtaaaactcaatctctgctgatagtgaataacgctacgaacgtcgtcattaaggt
gtgcgagtttcaattttgcaacgatccattcttgggagtgtactatcataagaacaacaaatcatggatggagagcgagtttagggtgtatt
cctctgcaaacaactgtacatttgaatacgtgagccagccttttcttatggacctcgaaggtaagcaaggtaacttcaagaacttgcggg
aatttgttttcaagaacattgatggatacttcaaaatttactccaaacatacccctatcaatctggtccgcgaccttccacaaggattttccgc
acttgaacccttggtcgacctgcctattggaatcaatatcacgcggtttcagacgcttctcgctctccatagatcctacctcacgcccggc
gacagttcaagtgggtggaccgcaggcgcggcggcctattatgtgggatacttgcaaccccgcacttttctcctgaaatataatgagaa
tgggaccataaccgatgcagttgattgtgccttggaccccctgtccgagaccaaatgcacgctgaagtctttcacagtagagaaggga
atttaccaaacttccaacttcagagttcaacccacagaatctatcgttcgctttcccaatattacaaatttgtgtccgtttggagaggtgttca
atgctacaaggtttgcttccgtatatgcctggaatcgtaaacgcatctctaattgcgtagcggactactcagttttgtataacagtgctagct
tctccactttcaagtgttacggcgttaatgggaccaagctgaatgacctgtgttttaccaacgtgtatgctgactccttcgtaataagaggg
gatgaggttaggcaaatcgcccctggccagacagggaaaatcgctgattacaattacaagttgccagatgactttaccgggtgtgtcat
cgcttggaactccaataatctggattccaaagttggtgggaactataattacctctatcggctgttcagaaaatccaaccttaagcccttcg
aaagagatatcaacactacaatttatcaggctggttcaactccgtgtaatggggtcgagggtttcaactgctacttcccgttgcagagttat
gggttccagccgacgaatggggtcgggtaccaaccgtacagagtagtagttctgtcctttgagttgaatcatgccccagcaacagtgtg
cggcccaaagaaatcaacaaaccttgttaagaataaatgcgtgaacttcaactttaacgggcttactgggactggggtgctcacagaat
ccaacaagaaattcttgccattccaacaatttggccgcgattgtgcagatacaaccgacgccgtgagagatccccaaacattggagata
cttgatatcactccctgctcttttggtggcgtcagcgtcatcaccccaggaaccaatacaagcaatcaagtggctgtcctttatcaagatgt
caattgtaccgaagtcccagtcgcaatacatgcggatcaactgaccccaacatggagagtttactcaacgggatctaacgtgtttcaaa
ctcgtgctggctgcctgataggagcggagcatgtgaataattcctatgaatgcgacattcccattggggctggaatctgtgcatcctatc
aaacacaaactaactctccccgccggcggcggagcgtcgccagccaaagcattattgcatatacgatgtccctgtgcgcagaaaattc
tgttgcatacagcaataactccatcgctatccctacaaactttaccatcagctgtacaaccgaaatcttgcccgtttctatgactaaaacaa
gttgtgactgcactatgtacatctgtggcgactcaacagagtgttctaaccttctgcttcaatatggatctttctgtacacaacttaatcgcgc
tctcaccggtatagctgttgagcaagataagaacactcaggaagttttcgcccaagtcaaacaatgttataaaacaccacccataaaag
acttcggcggatttaatttctctcaaatactgccggacccatccaggagacgaagaagcttcatagaagatcttctcttcaacaaggtgac
cctggccgatgcggggtttatcaagcaatatggcgactgtctcggcgatattgctgcacgcgatctgatatgtgcacagaaattcaatgg
gtgtaccgtgctcccacctctgctgacagatgaaatgatcgctcaatataccagtgcgctcttggctggaacaattactagtggttggact
tttggggctggagccgcactccaaatcccttttgccatgcaaatggcctatcgctttaatgggataggggtcactcagaatgtcttgtatg
aaaaccagaagttgattgctaaccaatttaattcagctatagggaaaattcaagacagcctcagtagtactgccagtgccctgggcaaa
ctgcaagatgtcgtgaaccaaaatgctcaagccctgaataccctcgttaagcaacttagctcaaactttggtgcgatttcctcaggcccta
atgacatcctctcaaggctgcctaaagtggaagctgaggtccaaatcgatcgcctgattacgggtcgcctgcaatcactccaaacatat
gtcacccagcagttgatcagagcggccgagatacgggcatcagcaaatttggcggccacgaaaatgtcagagtgcgtacttggtcaa
agtaaaagagttgatttctgcggaaaaggttaccaccttatgtctttcccccagtccgctccacatggagtggtctttctgcattgtacttat
gtgccagcccaagaaaagaattttactaccgcccccgctatttgtcatgatggtaaggcgcacttccccagagaaggagtgtttgtgtcc
aacgggactcactggtttgtgactcaaaggaacttttatgaacctcaaattatcaccacagataacacatttgtgtccgggaattgcgatgt
ggttatcggcattgttaataataccgtttacgatcccttgcaacctgagttggatagtttcaaggaagaacttgacaaatactttaagaatca
cacttccccggatgtagacctcggggacatttccggaattaatgcgagtgttgtgaatatacagaaagagatagaccgactcaacgag
gttgctaagaacctcaacgagagccttatcgatcttcaagaactcggcaaatacgagcaatacattaaatggccttggtccggcagaag
gagacggcgaaggggaagtggcggcagcggctctggatacatcccggaagctccacgggatgggcaagcatatgttcgcaaggat
ggagaatgggtccttcttagcaccttcttgggataatga (SEQ ID NO: 152)
ggauccgccaccauggacuggacauggauacuuuucuugguagcggcggcgacacgcgugcacuccauguuuguuuucc
ucguccugcucccacuugucucaagucaaugcguuaaccugacuacgaggacgcagcucccgcccgccuacacaaacucu
uuuacccgggguguguacuaccccgacaaaguuuuccgcaguucaugucuccacucaacacaggaccucuuucugccau
ucuucucaaaugucacaugguuucacgccauccacguuuccggcacuaacgguaccaaacgguucgacaacccuguucug
ccauucaaugaugggguguauuuugcgagcacagagaaguccaauauaaucagagguuggaucuucgguacaacgcugg
acaguaaaacucaaucucugcugauagugaauaacgcuacgaacgucgucauuaaggugugcgaguuucaauuuugcaa
cgauccauucuugggaguguacuaucauaagaacaacaaaucauggauggagagcgaguuuaggguguauuccucugca
aacaacuguacauuugaauacgugagccagccuuuucuuauggaccucgaagguaagcaagguaacuucaagaacuugc
gggaauuuguuuucaagaacauugauggauacuucaaaauuuacuccaaacauaccccuaucaaucugguccgcgaccuu
ccacaaggauuuuccgcacuugaacccuuggucgaccugccuauuggaaucaauaucacgcgguuucagacgcuucucg
cucuccauagauccuaccucacgcccggcgacaguucaaguggguggaccgcaggcgcggcggccuauuaugugggaua
cuugcaaccccgcacuuuucuccugaaauauaaugagaaugggaccauaaccgaugcaguugauugugccuuggaccccc
uguccgagaccaaaugcacgcugaagucuuucacaguagagaagggaauuuaccaaacuuccaacuucagaguucaaccc
acagaaucuaucguucgcuuucccaauauuacaaauuuguguccguuuggagagguguucaaugcuacaagguuugcuu
ccguauaugccuggaaucguaaacgcaucucuaauugcguagcggacuacucaguuuuguauaacagugcuagcuucuc
cacuuucaaguguuacggcguuaaugggaccaagcugaaugaccuguguuuuaccaacguguaugcugacuccuucgua
auaagaggggaugagguuaggcaaaucgccccuggccagacagggaaaaucgcugauuacaauuacaaguugccagaug
acuuuaccgggugugucaucgcuuggaacuccaauaaucuggauuccaaaguuggugggaacuauaauuaccucuaucg
gcuguucagaaaauccaaccuuaagcccuucgaaagagauaucaacacuacaauuuaucaggcugguucaacuccgugua
auggggucgaggguuucaacugcuacuucccguugcagaguuauggguuccagccgacgaauggggucggguaccaacc
guacagaguaguaguucuguccuuugaguugaaucaugccccagcaacagugugcggcccaaagaaaucaacaaaccuug
uuaagaauaaaugcgugaacuucaacuuuaacgggcuuacugggacuggggugcucacagaauccaacaagaaauucuu
gccauuccaacaauuuggccgcgauugugcagauacaaccgacgccgugagagauccccaaacauuggagauacuugaua
ucacucccugcucuuuugguggcgucagcgucaucaccccaggaaccaauacaagcaaucaaguggcuguccuuuaucaa
gaugucaauuguaccgaagucccagucgcaauacaugcggaucaacugaccccaacauggagaguuuacucaacgggauc
uaacguguuucaaacucgugcuggcugccugauaggagcggagcaugugaauaauuccuaugaaugcgacauucccauu
ggggcuggaaucugugcauccuaucaaacacaaacuaacucuccccgccggcggcggagcgucgccagccaaagcauuau
ugcauauacgaugucccugugcgcagaaaauucuguugcauacagcaauaacuccaucgcuaucccuacaaacuuuacca
ucagcuguacaaccgaaaucuugcccguuucuaugacuaaaacaaguugugacugcacuauguacaucuguggcgacuc
aacagaguguucuaaccuucugcuucaauauggaucuuucuguacacaacuuaaucgcgcucucaccgguauagcuguu
gagcaagauaagaacacucaggaaguuuucgcccaagucaaacaauguuauaaaacaccacccauaaaagacuucggcgga
uuuaauuucucucaaauacugccggacccauccaggagacgaagaagcuucauagaagaucuucucuucaacaaggugac
ccuggccgaugcgggguuuaucaagcaauauggcgacugucucggcgauauugcugcacgcgaucugauaugugcacag
aaauucaauggguguaccgugcucccaccucugcugacagaugaaaugaucgcucaauauaccagugcgcucuuggcug
gaacaauuacuagugguuggacuuuuggggcuggagccgcacuccaaaucccuuuugccaugcaaauggccuaucgcuu
uaaugggauaggggucacucagaaugucuuguaugaaaaccagaaguugauugcuaaccaauuuaauucagcuauaggg
aaaauucaagacagccucaguaguacugccagugcccugggcaaacugcaagaugucgugaaccaaaaugcucaagcccu
gaauacccucguuaagcaacuuagcucaaacuuuggugcgauuuccucaggcccuaaugacauccucucaaggcugccua
aaguggaagcugagguccaaaucgaucgccugauuacgggucgccugcaaucacuccaaacauaugucacccagcaguug
aucagagcggccgagauacgggcaucagcaaauuuggcggccacgaaaaugucagagugcguacuuggucaaaguaaaa
gaguugauuucugcggaaaagguuaccaccuuaugucuuucccccaguccgcuccacauggaguggucuuucugcauug
uacuuaugugccagcccaagaaaagaauuuuacuaccgcccccgcuauuugucaugaugguaaggcgcacuuccccagag
aaggaguguuuguguccaacgggacucacugguuugugacucaaaggaacuuuuaugaaccucaaauuaucaccacaga
uaacacauuuguguccgggaauugcgaugugguuaucggcauuguuaauaauaccguuuacgaucccuugcaaccugag
uuggauaguuucaaggaagaacuugacaaauacuuuaagaaucacacuuccccggauguagaccucggggacauuuccg
gaauuaaugcgaguguugugaauauacagaaagagauagaccgacucaacgagguugcuaagaaccucaacgagagccuu
aucgaucuucaagaacucggcaaauacgagcaauacauuaaauggccuugguccggcagaaggagacggcgaaggggaag
uggcggcagcggcucuggauacaucccggaagcuccacgggaugggcaagcauauguucgcaaggauggagaauggguc
cuucuuagcaccuucuugggauaauga (SEQ ID NO: 153)
MDWTWILFLVAAATRVHSMFVFLVLLPLVSSQCVNLTTRTQLPPAYTNSFTRGVYY
PDKVFRSSCLHSTQDLFLPFFSNVTWFHAIHVSGTNGTKRFDNPVLPFNDGVYFASTE
KSNIIRGWIFGTTLDSKTQSLLIVNNATNVVIKVCEFQFCNDPFLGVYYHKNNKSWM
ESEFRVYSSANNCTFEYVSQPFLMDLEGKQGNFKNLREFVFKNIDGYFKIYSKHTPIN
LVRDLPQGFSALEPLVDLPIGINITRFQTLLALHRSYLTPGDSSSGWTAGAAAYYVGY
LQPRTFLLKYNENGTITDAVDCALDPLSETKCTLKSFTVEKGIYQTSNFRVQPTESIVR
FPNITNLCPFGEVFNATRFASVYAWNRKRISNCVADYSVLYNSASFSTFKCYGVNGT
KLNDLCFTNVYADSFVIRGDEVRQIAPGQTGKIADYNYKLPDDFTGCVIAWNSNNLD
SKVGGNYNYLYRLFRKSNLKPFERDINTTIYQAGSTPCNGVEGFNCYFPLQSYGFQPT
NGVGYQPYRVVVLSFELNHAPATVCGPKKSTNLVKNKCVNFNFNGLTGTGVLTESN
KKFLPFQQFGRDCADTTDAVRDPQTLEILDITPCSFGGVSVITPGTNTSNQVAVLYQD
VNCTEVPVAIHADQLTPTWRVYSTGSNVFQTRAGCLIGAEHVNNSYECDIPIGAGICA
SYQTQTNSPRRRRSVASQSIIAYTMSLCAENSVAYSNNSIAIPTNFTISCTTEILPVSMT
KTSCDCTMYICGDSTECSNLLLQYGSFCTQLNRALTGIAVEQDKNTQEVFAQVKQCY
KTPPIKDFGGFNFSQILPDPSRRRRSFIEDLLFNKVTLADAGFIKQYGDCLGDIAARDLI
CAQKFNGCTVLPPLLTDEMIAQYTSALLAGTITSGWTFGAGAALQIPFAMQMAYRFN
GIGVTQNVLYENQKLIANQFNSAIGKIQDSLSSTASALGKLQDVVNQNAQALNTLVK
QLSSNFGAISSGPNDILSRLPKVEAEVQIDRLITGRLQSLQTYVTQQLIRAAEIRASANL
AATKMSECVLGQSKRVDFCGKGYHLMSFPQSAPHGVVFLHCTYVPAQEKNFTTAPA
ICHDGKAHFPREGVFVSNGTHWFVTQRNFYEPQIITTDNTFVSGNCDVVIGIVNNTVY
DPLQPELDSFKEELDKYFKNHTSPDVDLGDISGINASVVNIQKEIDRLNEVAKNLNES
LIDLQELGKYEQYIKWPWSGRRRRRRGSGGSGSGYIPEAPRDGQAYVRKDGEWVLL
STFLG** (SEQ ID NO: 154)
WuS_3F_D2P_GlyD2_pVax
ggatccgccaccatggattggacatggatactgtttctggtcgctgctgccacacgtgtccacagcatgtttgtcttcttggtgctcttgcc
tcttgtgagctcccaatgtgtgaatctgactacacgtacgcaacttccgcctgcctacaccaactctttcaccagaggcgtgtattatccg
gataaggtgttcaggagctcctgccttcattcaacacaggatttgtttctgcctttcttttcaaacgttacttggttccatgccatccacgtgtc
aggaacaaatggtaccaagagattcgataacccagttctcccttttaatgatggagtctattttgcaagcactgagaaaagtaatattatac
gaggttggattttcggaacgacactcgacagtaaaacacaatccctgttgatagtcaacaatgccacgaacgtagttataaaagtttgcg
aatttcaattttgcaacgatcctttcctgggtgtgtactatcacaagaacaacaaatcttggatggaaagcgagtttcgagtgtattcttcag
caaacaactgtactttcgaatatgtttctcaaccattcctgatggatctcgaaggtaaacagggcaactttaagaatctgagagagtttgtg
tttaagaacattgacggctattttaagatttacagcaaacatacgcctataaaccttgtgagagacctgcctcaagggtttagcgccctgg
aaccactcgtggacctgcctatcggcatcaatattaccagatttcaaacgctccttgccctgcataggagctatttgacacctggggactc
ttctagcggctggactgcaggcgctgccgcttattacgtgggatatctccagcctagaactttcctcttgaaatacaacgagaatggaac
cataacagacgcagttgattgtgctctcgaccccttgtccgagaccaaatgcacactgaaaagttttaccgtggagaaagggatctatca
aactagtaatttccgcgttcaacccactgagagcatagtgaggtttcctaacattacaaatctttgcccgtttggggaagtgtttaatgcca
ctcgttttgctagtgtatacgcctggaatcgaaagcggatttccaattgcgttgctgactacagtgtactctataatagcgcttcatttagca
ccttcaagtgctacggggttaacgggaccaaactcaatgacctctgcttcacgaacgtttacgccgactcctttgtcattcgaggtgacg
aagtaagacaaatcgccccaggccagactggaaagatcgcggactacaactataagctgccagacgacttcactggatgtgtgatcg
cctggaatagtaacaacctcgactccaaggtgggtggcaattacaattatctctataggctgttcaggaagagtaatttgaaaccattcga
gcgcgacataaatacaacaatctaccaagcgggttctaccccttgcaacggcgtggaaggttttaattgttacttccctctccaaagctac
gggtttcaaccaacaaacggcgtgggataccaaccatacagggtggttgtgttgagcttcgaattgaatcatgcacctgcaacagtgtg
tgggcccaagaagtccaccaatctcgttaagaataaatgcgtgaacttcaactttaacgggttgacagggaccggcgtgcttacggaa
agtaataagaaattccttcccttccagcaatttggtcgcgactgtgcggatacaacggacgcagtgcgagacccacagacattggagat
cctggacataacaccttgctcttttggggggtctccgtaataacacctggaacaaataccagcaatcaagtagcggtcttgtatcaaga
tgtaaactgtactgaagtcccagttgctatacatgcagaccaacttacaccgacgtggcgcgtgtattctacgggctccaacgtattcca
aaccagagcagggtgcttgataggggcagagcacgtcaacaatagctatgagtgtgatatcccgataggtgctggaatctgcgcaag
ttaccagacccaaaccaatagcccccgccggagacgatcagtggcaagccagtctataatagcctacacgatgtcactgtgtgccga
aaatagcgttgcctatagtaacaatagcatcgccattccaaccaatttcacaatatcagtcactactgagattctgcctgtgtcaatgacta
aaactagtgtggactgcacaatgtatatttgcggcgattccacagaatgtagcaatcttctgctgcaatatgggagtttctgtacacaattg
aatcgggcccttactggaatcgccgtagagcaggacaagaacacccaagaagtctttgcgcaagtcaaacaatgttataagactcccc
caattaaagattttggcggctttaattttagccaaatacttcccgaccccagccgccgacgacgctcctttatcgaagatctgttgtttaata
aagtcacattggctgatgctggctttatcaaacaatacggtgattgtctgggtgatattgcagcccgagatctgatctgcgcccaaaagtt
taacggcttgaccgttctcccgccactcctgacagatgagatgatcgcgcaatatacctctgcactcctggcgggaacaatcactagtg
gttggactttcggcgccggcgctgcactgcaaattcccttcgccatgcaaatggcctatcggtttaacggaattggtgtgactcagaatg
tgctttacgaaaatcagaaactcatagctaatcagtttaacagcgcaatcgggaaaattcaggattccctcagcagcaccgctagcgcct
tgggcaagctgcaggacgttgtaaaccagaacgctcaggccctcaacactctcgttaaacaattgagctctaactttggggccataagc
agtggtcctaacgacatcctgagtcgtctgccaaaggtagaggccgaagtgcaaatcgaccggctcatcactggaagactgcaaagc
ctgcaaacctatgtcacacagcaacttatacgggccgccgaaatcagggcctcagcaaacctcgcagcaacaaagatgagcgagtgt
gtgctgggccaatccaagcgcgtggacttctgtggtaagggataccatctgatgtcctttccccaatccgcgcctcatggagtagttttcc
tgcacgttacgtatgtgcctgcccaagagaagaactttacaacagcaccagccatttgtcatgacggaaaagcccattttcctagagaa
ggagtctttgtttccaatgggacacattggtttgttacccagcgtaacttttatgagccacaaatcatcaccacggacaatactttcgtgag
cggtaattgtgatgtggtcattggcatagtgaataacactgtttacgaccccctgcaaccggaattggacagcttcaaagaagaactgga
caagtacttcaagaaccacacatccccagacgtagacctcggagatatttccggaattaacgcatcagtagttaacatccagaaagaaa
tagatcgactgaatgaggtcgctaagaacttgaacgaatcacttatagatctccaggaactcggcaaatatgagcaatatattaaatggc
cctggtcaggtcgcagaagacgccgccggggttccggcggatctggatctggatatattcccgaagctccacgggatgggcaagcc
tacgtaagaaaggatggagaatgggtacttttgtccacgttcttgggctagtag (SEQ ID NO: 155)
ggauccgccaccauggauuggacauggauacuguuucuggucgcugcugccacacguguccacagcauguuugucuucu
uggugcucuugccucuugugagcucccaaugugugaaucugacuacacguacgcaacuuccgccugccuacaccaacuc
uuucaccagaggcguguauuauccggauaagguguucaggagcuccugccuucauucaacacaggauuuguuucugccu
uucuuuucaacguuacuugguuccaugccauccacgugucaggaacaaaugguaccaagagauucgauaacccaguuc
ucccuuuuaaugauggagucuauuuugcaagcacugagaaaaguaauauuauacgagguuggauuuucggaacgacacu
cgacaguaaaacacaaucccuguugauagucaacaaugccacgaacguaguuauaaaaguuugcgaauuucaauuuugca
acgauccuuuccuggguguguacuaucacaagaacaacaaaucuuggauggaaagcgaguuucgaguguauucuucagc
aaacaacuguacuuucgaauauguuucucaaccauuccugauggaucucgaagguaaacagggcaacuuuaagaaucuga
gagaguuuguguuuaagaacauugacggcuauuuuaagauuuacagcaaacauacgccuauaaaccuugugagagaccu
gccucaaggguuuagcgcccuggaaccacucguggaccugccuaucggcaucaauauuaccagauuucaaacgcuccuug
cccugcauaggagcuauuugacaccuggggacucuucuagcggcuggacugcaggcgcugccgcuuauuacgugggaua
ucuccagccuagaacuuuccucuugaaauacaacgagaauggaaccauaacagacgcaguugauugugcucucgaccccu
uguccgagaccaaaugcacacugaaaaguuuuaccguggagaaagggaucuaucaaacuaguaauuuccgcguucaaccc
acugagagcauagugagguuuccuaacauuacaaaucuuugcccguuuggggaaguguuuaaugccacucguuuugcua
guguauacgccuggaaucgaaagcggauuuccaauugcguugcugacuacaguguacucuauaauagcgcuucauuuag
caccuucaagugcuacgggguuaacgggaccaaacucaaugaccucugcuucacgaacguuuacgccgacuccuuuguca
uucgaggugacgaaguaagacaaaucgccccaggccagacuggaaagaucgcggacuacaacuauaagcugccagacgac
uucacuggaugugugaucgccuggaauaguaacaaccucgacuccaagguggguggcaauuacaauuaucucuauaggc
uguucaggaagaguaauuugaaaccauucgagcgcgacauaaauacaacaaucuaccaagcggguucuaccccuugcaac
ggcguggaagguuuuaauuguuacuucccucuccaaagcuacggguuucaaccaacaaacggcgugggauaccaaccau
acagggugguuguguugagcuucgaauugaaucaugcaccugcaacagugugugggcccaagaaguccaccaaucucgu
uaagaauaaaugcgugaacuucaacuuuaacggguugacagggaccggcgugcuuacggaaaguaauaagaaauuccuu
cccuuccagcaauuuggucgcgacugugcggauacaacggacgcagugcgagacccacagacauuggagauccuggacau
aacaccuugcucuuuuggcggggucuccguaauaacaccuggaacaaauaccagcaaucaaguagcggucuuguaucaag
auguaaacuguacugaagucccaguugcuauacaugcagaccaacuuacaccgacguggcgcguguauucuacgggcuc
caacguauuccaaaccagagcagggugcuugauaggggcagagcacgucaacaauagcuaugagugugauaucccgaua
ggugcuggaaucugcgcaaguuaccagacccaaaccaauagcccccgccggagacgaucaguggcaagccagucuauaau
agccuacacgaugucacugugugccgaaaauagcguugccuauaguaacaauagcaucgccauuccaaccaauuucacaa
uaucagucacuacugagauucugccugugucaaugacuaaaacuaguguggacugcacaauguauauuugcggcgauuc
cacagaauguagcaaucuucugcugcaauaugggaguuucuguacacaauugaaucgggcccuuacuggaaucgccgua
gagcaggacaagaacacccaagaagucuuugcgcaagucaaacaauguuauaagacucccccaauuaaagauuuuggcgg
cuuuaauuuuagccaaauacuucccgaccccagccgccgacgacgcuccuuuaucgaagaucuguuguuuaauaaaguca
cauuggcugaugcuggcuuuaucaaacaauacggugauugucugggugauauugcagcccgagaucugaucugcgccca
aaaguuuaacggcuugaccguucucccgccacuccugacagaugagaugaucgcgcaauauaccucugcacuccuggcgg
gaacaaucacuagugguuggacuuucggcgccggcgcugcacugcaaauucccuucgccaugcaaauggccuaucgguu
uaacggaauuggugugacucagaaugugcuuuacgaaaaucagaaacucauagcuaaucaguuuaacagcgcaaucggg
aaaauucaggauucccucagcagcaccgcuagcgccuugggcaagcugcaggacguuguaaaccagaacgcucaggcccu
caacacucucguuaaacaauugagcucuaacuuuggggccauaagcagugguccuaacgacauccugagucgucugccaa
agguagaggccgaagugcaaaucgaccggcucaucacuggaagacugcaaagccugcaaaccuaugucacacagcaacuu
auacgggccgccgaaaucagggccucagcaaaccucgcagcaacaaagaugagcgagugugugcugggccaauccaagcg
cguggacuucugugguaagggauaccaucugauguccuuuccccaauccgcgccucauggaguaguuuuccugcacguu
acguaugugccugcccaagagaagaacuuuacaacagcaccagccauuugucaugacggaaaagcccauuuuccuagaga
aggagucuuuguuuccaaugggacacauugguuuguuacccagcguaacuuuuaugagccacaaaucaucaccacggac
aaucuuucugagcgguaauugugauguggucauuggcauagugaauaacacuguuuacgacccccugcaaccggaau
uggacagcuucaaagaagaacuggacaaguacuucaagaaccacacauccccagacguagaccucggagauauuuccgga
auuaacgcaucaguaguuaacauccagaaagaaauagaucgacugaaugaggucgcuaagaacuugaacgaaucacuuau
agaucuccaggaacucggcaaauaugagcaauauauuaaauggcccuggucaggucgcagaagacgccgccgggguucc
ggcggaucuggaucuggauauauucccgaagcuccacgggaugggcaagccuacguaagaaaggauggagaauggguac
uuuuguccacguucuugggcuaguag (SEQ ID NO: 156)
MDWTWILFLVAAATRVHSMFVFLVLLPLVSSQCVNLTTRTQLPPAYTNSFTRGVYY
PDKVFRSSCLHSTQDLFLPFFSNVTWFHAIHVSGTNGTKRFDNPVLPFNDGVYFASTE
KSNIIRGWIFGTTLDSKTQSLLIVNNATNVVIKVCEFQFCNDPFLGVYYHKNNKSWM
ESEFRVYSSANNCTFEYVSQPFLMDLEGKQGNFKNLREFVFKNIDGYFKIYSKHTPIN
LVRDLPQGFSALEPLVDLPIGINITRFQTLLALHRSYLTPGDSSSGWTAGAAAYYVGY
LQPRTFLLKYNENGTITDAVDCALDPLSETKCTLKSFTVEKGIYQTSNFRVQPTESIVR
FPNITNLCPFGEVFNATRFASVYAWNRKRISNCVADYSVLYNSASFSTFKCYGVNGT
KLNDLCFTNVYADSFVIRGDEVRQIAPGQTGKIADYNYKLPDDFTGCVIAWNSNNLD
SKVGGNYNYLYRLFRKSNLKPFERDINTTIYQAGSTPCNGVEGFNCYFPLQSYGFQPT
NGVGYQPYRVVVLSFELNHAPATVCGPKKSTNLVKNKCVNFNFNGLTGTGVLTESN
KKFLPFQQFGRDCADTTDAVRDPQTLEILDITPCSFGGVSVITPGTNTSNQVAVLYQD
VNCTEVPVAIHADQLTPTWRVYSTGSNVFQTRAGCLIGAEHVNNSYECDIPIGAGICA
SYQTQTNSPRRRRSVASQSIIAYTMSLCAENSVAYSNNSIAIPTNFTISVTTEILPVSMT
KTSVDCTMYICGDSTECSNLLLQYGSFCTQLNRALTGIAVEQDKNTQEVFAQVKQC
YKTPPIKDFGGFNFSQILPDPSRRRRSFIEDLLFNKVTLADAGFIKQYGDCLGDIAARD
LICAQKFNGLTVLPPLLTDEMIAQYTSALLAGTITSGWTFGAGAALQIPFAMQMAYR
FNGIGVTQNVLYENQKLIANQFNSAIGKIQDSLSSTASALGKLQDVVNQNAQALNTL
VKQLSSNFGAISSGPNDILSRLPKVEAEVQIDRLITGRLQSLQTYVTQQLIRAAEIRASA
NLAATKMSECVLGQSKRVDFCGKGYHLMSFPQSAPHGVVFLHVTYVPAQEKNFTT
APAICHDGKAHFPREGVFVSNGTHWFVTQRNFYEPQIITTDNTFVSGNCDVVIGIVNN
TVYDPLQPELDSFKEELDKYFKNHTSPDVDLGDISGINASVVNIQKEIDRLNEVAKNL
NESLIDLQELGKYEQYIKWPWSGRRRRRRGSGGSGSGYIPEAPRDGQAYVRKDGEW
VLLSTFLG** (SEQ ID NO: 157)
WuS_3F_D2P_GlyD1_pVax
ggatccgccaccatggactggacatggatacttttcttggtggcagctgctacacgcgtccactcaatgttcgtctttctggtgctcttgcc
actggtgagcagccaatgcgttaacctcaccacacgcacgcagcttccacccgcatacactaactcctttacgcgcggcgtgtactatc
cagataaagtgttccgaagtagcgtcttgcatagcacccaggatctgtttctcccattctttagcaatgtcacatggttccacgctatccac
gtgtctgggacgaatggaactaaacgttttgacaatcctgttcttccttttaacgacggcgtatactttgctagtactgagaagtctaacatt
atccgcggctggattttcgggacaaccctggactccaaaacccagtctctgctgatagtaaacaatgccaccaacgtcgtcattaaagt
gtgcgagtttcaattctgcaacgacccctttctgggtgtctattaccacaagaacaataagtcttggatggagtcagaatttcgtgtctattc
ttctgccaataattgtacatttgagtatgtttctcaaccctttctcatggacctcgaaggcaagcaggggaattttaagaacctgcgggaatt
cgtctttaagaatatcgacggctatttcaaaatttacagcaaacacacgcctataaacctcgtgcgagatctcccccaaggcttctcagca
ttggagccattggtcgacttgccaatcggaattaatatcacaaggtttcagactctgctggccctgcatcgctcctatcttacccctggcg
attcctcaagtggctggacggccggcgcagcagcctattacgtcggctatctccagccaaggacgtttcttttgaagtataatgaaaatg
ggactattactgacgccgtcgactgcgctttggaccccctgagcgagacaaagtgcacattgaaaagcttcacggtggagaagggtat
ttatcaaacttccaactttagggtgcaaccaacagagagcatcgtgaggttccctaatatcactaatctctgtccatttggcgaggtgttta
acgcgaccagatttgcaagcgtatatgcctggaataggaagagaataagcaattgtgttgccgattactctgtcttgtataacagcgcat
ctttcagcacttttaagtgctatggtgtcaacgggacaaaacttaacgatctttgcttcaccaacgtttacgcagactcttttgtcatacgcg
gagatgaggtccgacaaatagctcccggccagactgggaaaatcgctgattataactataagcttccagatgacttcacaggatgcgta
attgcatggaactctaacaacctggactcaaaagttggtggcaactataactatctctatcgtttgttccgaaaatcaaaccttaaacccttt
gaacgggatattaatacgacaatttaccaagcagggagcactccttgtaacggtgtagaaggtttcaattgttattttcctctgcaatcata
cggattccaaccaacaaacggtgtgggttatcaaccttatcgggttgtagttttgagcttcgagcttaaccatgcacccgccacagtatgc
ggaccgaagaagagtacaaacctggttaagaataaatgtgtaaacttcaactttaatggactgacggggacgggagtactcactgaaa
gcaataagaaattcttgccttttcagcaattcggggggacatagcggacactacagacgccgtgcgcgacccccagactctcgaaat
cctggacataaccccgtgctcatttggcggagtttcagtcatcactccagggaccaatacctcaaaccaagtagctgtgctgtatcaaga
tgtgaattgcaccgaagtaccagtggccattcacgccgatcagctgaccccgacatgggggtgtactcaaccggttcaaatgtgtttc
aaacaagagcaggttgtcttattggcgctgaacacgtgaataactcctatgaatgcgacatcccaattggtgccggaatctgtgcctctta
tcaaacacaaactaattcaccaaggcgtaggcgcagcgtcgcctctcaatcaattatagcctacaccatgtcactgggtgccgaaaact
ccgtcgcgtacagcaacaatagcattgccatccctaccaacttcaccatcagctgtacaactgagatcctgcctgtatccatgacaaaga
catcctgcgattgcactatgtacatctgtggagactctactgagtgtagcaacctcttgctccaatacgggagtttctgtacgcaactcaac
cgtgccctcaccggcatagccgtagagcaagataagaatacccaggaagtatttgcccaagtaaagcaaatttataagacgccaccca
ttaaagactttggcggtttcaacttcagtcaaatactgccagacccgtctcgcaggagaaggagttttattgaagacctgctctttaacaa
ggtgactcttgccgatgctggatttattaaacaatatggggattgtctcggagatatcgctgctcgggatcttatctgcgcgcagaaattca
acgggtgtaccgtgctcccacccttgctcactgacgaaatgatcgcgcaatatacctcagcacttctggcgggaactattacatctggtt
ggacattcggcgcaggggcagctctccaaattcccttcgcaatgcaaatggcttacaggttcaatggcataggtgtcacacaaaacgt
gctgtacgagaatcaaaagcttatagccaatcagtttaatagcgccataggcaagatccaagattccctgagctccacggcaagcgctc
tgggaaaattgcaagacgtagtcaatcaaaacgctcaagcgctgaatacccttgtgaaacaactttcttcaaactttggagctatctcatct
gggcccaacgatattctgagtcgactgccaaaggttgaagctgaagtccaaattgatcggttgatcacaggaaggctgcaatccctgc
agacttacgtgacccagcaactgatcagggcagccgaaataagggcttccgccaatctggcagccacaaagatgtctgaatgtgtctt
gggtcaaagcaaacgcgtcgatttctgtggcaaggggtaccatctgatgtcattccctcaatctgcccctcacggtgtggtatttctccatt
gcacttatgttcccgcacaggagaagaacttcacaacagctcccgccatttgccacgacggaaaggcgcattttccccgcgaaggtgt
cttcgtgtccaatgggactcattggtttgtgactcagaggaatttctatgagccgcagattatcaccaccgacaacactttcgtctccggta
actgcgacgtcgttatcggaatcgtcaataacacagtgtatgatcctctgcagccggagctggactcattcaaagaggagttggataaat
attttaagaatcatacaagccccgacgtcgatctgggcgatattagtggtatcaatgcgtccgtggttaacattcagaaagagattgaca
gactcaatgaggtcgccaagaacttgaacgaatccttgattgatctccaggagttgggcaagtatgagcaatatatcaagtggccatgg
tctgggcgaaggcgccgtcgcagagggtccggcggtagtggttccgggtacataccagaagctccacgagatggtcaagcttatgta
aggaaagacggagagtgggtcctgcttagcacattcttgggttgataa (SEQ ID NO: 158)
ggauccgccaccauggacuggacauggauacuuuucuugguggcagcugcuacacgcguccacucaauguucgucuuuc
uggugcucuugccacuggugagcagccaaugcguuaaccucaccacacgcacgcagcuuccacccgcauacacuaacucc
uuuacgcgcggcguguacuauccagauaaaguguuccgaaguagcgucuugcauagcacccaggaucuguuucucccau
ucuuuagcaaugucacaugguuccacgcuauccacgugucugggacgaauggaacuaaacguuuugacaauccuguucu
uccuuuuaacgacggcguauacuuugcuaguacugagaagucuaacauuauccgcggcuggauuuucgggacaacccug
gacuccaaaacccagucucugcugauaguaaacaaugccaccaacgucgucauuaaagugugcgaguuucaauucugcaa
cgaccccuuucugggugucuauuaccacaagaacaauaagucuuggauggagucagaauuucgugucuauucuucugcc
aauaauuguacauuugaguauguuucucaacccuuucucauggaccucgaaggcaagcaggggaauuuuaagaaccugc
gggaauucgucuuuaagaauaucgacggcuauuucaaaauuuacagcaaacacacgccuauaaaccucgugcgagaucuc
ccccaaggcuucucagcauuggagccauuggucgacuugccaaucggaauuaauaucacaagguuucagacucugcugg
cccugcaucgcuccuaucuuaccccuggcgauuccucaaguggcuggacggccggcgcagcagccuauuacgucggcua
ucuccagccaaggacguuucuuuugaaguauaaugaaaaugggacuauuacugacgccgucgacugcgcuuuggacccc
cugagcgagacaaagugcacauugaaaagcuucacgguggagaaggguauuuaucaaacuuccaacuuuagggugcaac
caacagagagcaucgugagguucccuaauaucacuaaucucuguccauuuggcgagguguuuaacgcgaccagauuugc
aagcguauaugccuggaauaggaagagaauaagcaauuguguugccgauuacucugucuuguauaacagcgcaucuuuc
agcacuuuuaagugcuauggugucaacgggacaaaacuuaacgaucuuugcuucaccaacguuuacgcagacucuuuug
ucauacgcggagaugagguccgacaaauagcucccggccagacugggaaaaucgcugauuauaacuauaagcuuccagau
gacuucacaggaugcguaauugcauggaacucuaacaaccuggacucaaaaguugguggcaacuauaacuaucucuaucg
uuuguuccgaaaaucaaaccuuaaacccuuugaacgggauauuaauacgacaauuuaccaagcagggagcacuccuugua
acgguguagaagguuucaauuguuauuuuccucugcaaucauacggauuccaaccaacaaacgguguggguuaucaacc
uuaucgguuguaguuuugagcuucgagcuuaaccaugcacccgccacaguaugcggaccgaagaagaguacaaaccug
guuaaaaaaauguguaaacuucaacuuuaauggacugacggggacgggaguacucacugaaagcaauaagaaauucu
ugccuuuucagcaauucggggggacauagcggacacuacagacgccgugcgcgacccccagacucucgaaauccuggac
auaaccccgugcucauuuggcggaguuucagucaucacuccagggaccaauaccucaaaccaaguagcugugcuguauca
agaugugaauugcaccgaaguaccaguggccauucacgccgaucagcugaccccgacauggcggguguacucaaccggu
ucaaauguguuucaaacaagagcagguugucuuauuggcgcugaacacgugaauaacuccuaugaaugcgacaucccaa
uuggugccggaaucugugccucuuaucaaacacaaacuaauucaccaaggcguaggcgcagcgucgccucucaaucaauu
auagccuacaccaugucacugggugccgaaaacuccgucgcguacagcaacaauagcauugccaucccuaccaacuucacc
aucagcuguacaacugagauccugccuguauccaugacaaagacauccugcgauugcacuauguacaucuguggagacuc
uacugaguguagcaaccucuugcuccaauacgggaguuucuguacgcaacucaaccgugcccucaccggcauagccguag
agcaagauaagaauacccaggaaguauuugcccaaguaaagcaaauuuauaagacgccacccauuaaagacuuuggcggu
uucaacuucagucaaauacugccagacccgucucgcaggagaaggaguuuuauugaagaccugcucuuuaacaagguga
cucuugccgaugcuggauuuauuaaacaauauggggauugucucggagauaucgcugcucgggaucuuaucugcgcgc
agaaauucaacggguguaccgugcucccacccuugcucacugacgaaaugaucgcgcaauauaccucagcacuucuggcg
ggaacuauuacaucugguuggacauucggcgcaggggcagcucuccaaauucccuucgcaaugcaaauggcuuacaggu
ucaauggcauaggugucacacaaaacgugcuguacgagaaucaaaagcuuauagccaaucaguuuaauagcgccauaggc
aagauccaagauucccugagcuccacggcaagcgcucugggaaaauugcaagacguagucaaucaaaacgcucaagcgcu
gaauacccuugugaaacaacuuucuucaaacuuuggagcuaucucaucugggcccaacgauauucugagucgacugccaa
agguugaagcugaaguccaaauugaucgguugaucacaggaaggcugcaaucccugcagacuuacgugacccagcaacu
gaucagggcagccgaaauaagggcuuccgccaaucuggcagccacaaagaugucugaaugugucuugggucaaagcaaac
gcgucgauuucuguggcaagggguaccaucugaugucauucccucaaucugccccucacggugugguauuucuccauug
cacuuauguucccgcacaggagaagaacuucacaacagcucccgccauuugccacgacggaaaggcgcauuuuccccgcg
aaggugucuucguguccaaugggacucauugguuugugacucagaggaauuucuaugagccgcagauuaucaccaccga
caacacuuucgucuccgguaacugcgacgucguuaucggaaucgucaauaacacaguguaugauccucugcagccggag
cuggacucauucaaagaggaguuggauaaauauuuuaagaaucauacaagccccgacgucgaucugggcgauauuagug
guaucaaugcguccgugguuaacauucagaaagagauugacagacucaaugaggucgccaagaacuugaacgaauccuu
gauugaucuccaggaguugggcaaguaugagcaauauaucaaguggccauggucugggcgaaggcgccgucgcagaggg
uccggcgguagugguuccggguacauaccagaagcuccacgagauggucaagcuuauguaaggaaagacggagaguggg
uccugcuuagcacauucuuggguugauaa (SEQ ID NO: 159)
MDWTWILFLVAAATRVHSMFVFLVLLPLVSSQCVNLTTRTQLPPAYTNSFTRGVYY
PDKVFRSSVLHSTQDLFLPFFSNVTWFHAIHVSGTNGTKRFDNPVLPFNDGVYFASTE
KSNIIRGWIFGTTLDSKTQSLLIVNNATNVVIKVCEFQFCNDPFLGVYYHKNNKSWM
ESEFRVYSSANNCTFEYVSQPFLMDLEGKQGNFKNLREFVFKNIDGYFKIYSKHTPIN
LVRDLPQGFSALEPLVDLPIGINITRFQTLLALHRSYLTPGDSSSGWTAGAAAYYVGY
LQPRTFLLKYNENGTITDAVDCALDPLSETKCTLKSFTVEKGIYQTSNFRVQPTESIVR
FPNITNLCPFGEVFNATRFASVYAWNRKRISNCVADYSVLYNSASFSTFKCYGVNGT
KLNDLCFTNVYADSFVIRGDEVRQIAPGQTGKIADYNYKLPDDFTGCVIAWNSNNLD
SKVGGNYNYLYRLFRKSNLKPFERDINTTIYQAGSTPCNGVEGFNCYFPLQSYGFQPT
NGVGYQPYRVVVLSFELNHAPATVCGPKKSTNLVKNKCVNFNFNGLTGTGVLTESN
KKFLPFQQFGRDIADTTDAVRDPQTLEILDITPCSFGGVSVITPGTNTSNQVAVLYQD
VNCTEVPVAIHADQLTPTWRVYSTGSNVFQTRAGCLIGAEHVNNSYECDIPIGAGICA
SYQTQTNSPRRRRSVASQSIIAYTMSLGAENSVAYSNNSIAIPTNFTISCTTEILPVSMT
KTSCDCTMYICGDSTECSNLLLQYGSFCTQLNRALTGIAVEQDKNTQEVFAQVKQIY
KTPPIKDFGGFNFSQILPDPSRRRRSFIEDLLFNKVTLADAGFIKQYGDCLGDIAARDLI
CAQKFNGCTVLPPLLTDEMIAQYTSALLAGTITSGWTFGAGAALQIPFAMQMAYRFN
GIGVTQNVLYENQKLIANQFNSAIGKIQDSLSSTASALGKLQDVVNQNAQALNTLVK
QLSSNFGAISSGPNDILSRLPKVEAEVQIDRLITGRLQSLQTYVTQQLIRAAEIRASANL
AATKMSECVLGQSKRVDFCGKGYHLMSFPQSAPHGVVFLHCTYVPAQEKNFTTAPA
ICHDGKAHFPREGVFVSNGTHWFVTQRNFYEPQIITTDNTFVSGNCDVVIGIVNNTVY
DPLQPELDSFKEELDKYFKNHTSPDVDLGDISGINASVVNIQKEIDRLNEVAKNLNES
LIDLQELGKYEQYIKWPWSGRRRRRRGSGGSGSGYIPEAPRDGQAYVRKDGEWVLL
STFLG** (SEQ ID NO: 160)

[0270] In some embodiments therefore, the expressible nucleic acid sequence comprised in the composition of the disclosure comprises at least about 70%, 75%, 80%, 85%, 90%, 91%, 92%, 93%, 94%, 95%, 96%, 97%, 98% or 99% sequence identity to SEQ ID NO: 68, SEQ ID NO: 69, SEQ ID NO: 71, SEQ ID NO: 72, SEQ ID NO: 74, SEQ ID NO: 75, SEQ ID NO: 77, SEQ ID NO: 78, SEQ ID NO: 80, SEQ ID NO: 81, SEQ ID NO: 83, SEQ ID NO: 84, SEQ ID NO: 86, SEQ ID NO: 87, SEQ ID NO: 89, SEQ ID NO: 90, SEQ ID NO: 92, SEQ ID NO: 93, SEQ ID NO: 95, SEQ ID NO: 96, SEQ ID NO: 98, SEQ ID NO: 99, SEQ ID NO: 101, SEQ ID NO: 102, SEQ ID NO: 104, SEQ ID NO: 105, SEQ ID NO: 107, SEQ ID NO: 108, SEQ ID NO: 110, SEQ ID NO: 111, SEQ ID NO: 113, SEQ ID NO: 114, SEQ ID NO: 116, SEQ ID NO: 117, SEQ ID NO: 119, SEQ ID NO: 120, SEQ ID NO: 122, SEQ ID NO: 123, SEQ ID NO: 125, SEQ ID NO: 126, SEQ ID NO: 128, SEQ ID NO: 129, SEQ ID NO: 131, SEQ ID NO: 132, SEQ ID NO: 134, SEQ ID NO: 135, SEQ ID NO: 137, SEQ ID NO: 138, SEQ ID NO: 140, SEQ ID NO: 141, SEQ ID NO: 143, SEQ ID NO: 144, SEQ ID NO: 146, SEQ ID NO: 147, SEQ ID NO: 149, SEQ ID NO: 150, SEQ ID NO: 152, SEQ ID NO: 153, SEQ ID NO: 155, SEQ ID NO: 156, SEQ ID NO: 158 or SEQ ID NO: 159, or a functional fragment or variant thereof. In some embodiments, the expressible nucleic acid sequence comprises the nucleic acid sequence of SEQ ID NO: 68, SEQ ID NO: 69, SEQ ID NO: 71, SEQ ID NO: 72, SEQ ID NO: 74, SEQ ID NO: 75, SEQ ID NO: 77, SEQ ID NO: 78, SEQ ID NO: 80, SEQ ID NO: 81, SEQ ID NO: 83, SEQ ID NO: 84, SEQ ID NO: 86, SEQ ID NO: 87, SEQ ID NO: 89, SEQ ID NO: 90, SEQ ID NO: 92, SEQ ID NO: 93, SEQ ID NO: 95, SEQ ID NO: 96, SEQ ID NO: 98, SEQ ID NO: 99, SEQ ID NO: 101, SEQ ID NO: 102, SEQ ID NO: 104, SEQ ID NO: 105, SEQ ID NO: 107, SEQ ID NO: 108, SEQ ID NO: 110, SEQ ID NO: 111, SEQ ID NO: 113, SEQ ID NO: 114, SEQ ID NO: 116, SEQ ID NO: 117, SEQ ID NO: 119, SEQ ID NO: 120, SEQ ID NO: 122, SEQ ID NO: 123, SEQ ID NO: 125, SEQ ID NO: 126, SEQ ID NO: 128, SEQ ID NO: 129, SEQ ID NO: 131, SEQ ID NO: 132, SEQ ID NO: 134, SEQ ID NO: 135, SEQ ID NO: 137, SEQ ID NO: 138, SEQ ID NO: 140, SEQ ID NO: 141, SEQ ID NO: 143, SEQ ID NO: 144, SEQ ID NO: 146, SEQ ID NO: 147, SEQ ID NO: 149, SEQ ID NO: 150, SEQ ID NO: 152, SEQ ID NO: 153, SEQ ID NO: 155, SEQ ID NO: 156, SEQ ID NO: 158 or SEQ ID NO: 159, or a functional fragment or variant thereof. In some embodiments, the expressible nucleic acid sequence comprised in the composition of the disclosure encodes a polypeptide comprising at least about 70%, 75%, 80%, 85%, 90%, 91%, 92%, 93%, 94%, 95%, 96%, 97%, 98% or 99% sequence identity to SEQ ID NO: 70, SEQ ID NO: 73, SEQ ID NO: 76, SEQ ID NO: 79, SEQ ID NO: 82, SEQ ID NO: 85, SEQ ID NO: 88, SEQ ID NO: 91, SEQ ID NO: 94, SEQ ID NO: 97, SEQ ID NO: 100, SEQ ID NO: 103, SEQ ID NO: 106, SEQ ID NO: 109, SEQ ID NO: 112, SEQ ID NO: 115, SEQ ID NO: 118, SEQ ID NO: 121, SEQ ID NO: 124, SEQ ID NO: 127, SEQ ID NO: 130, SEQ ID NO: 133, SEQ ID NO: 136, SEQ ID NO: 139, SEQ ID NO: 142, SEQ ID NO: 145, SEQ ID NO: 148, SEQ ID NO: 151, SEQ ID NO: 154, SEQ ID NO: 157 or SEQ ID NO: 160, or a functional fragment or variant thereof. In some embodiments, the expressible nucleic acid sequence encodes a polypeptide comprising the amino acid sequence of SEQ ID NO: 70, SEQ ID NO: 73, SEQ ID NO: 76, SEQ ID NO: 79, SEQ ID NO: 82, SEQ ID NO: 85, SEQ ID NO: 88, SEQ ID NO: 91, SEQ ID NO: 94, SEQ ID NO: 97, SEQ ID NO: 100, SEQ ID NO: 103, SEQ ID NO: 106, SEQ ID NO: 109, SEQ ID NO: 112, SEQ ID NO: 115, SEQ ID NO: 118, SEQ ID NO: 121, SEQ ID NO: 124, SEQ ID NO: 127, SEQ ID NO: 130, SEQ ID NO: 133, SEQ ID NO: 136, SEQ ID NO: 139, SEQ ID NO: 142, SEQ ID NO: 145, SEQ ID NO: 148, SEQ ID NO: 151, SEQ ID NO: 154, SEQ ID NO: 157 or SEQ ID NO: 160, or a functional fragment or variant thereof.

### B. Nucleic Acid Molecule

[0271] In some embodiments, the present disclosure also relates to a nucleic acid molecule that comprises any of the disclosed expressible nucleic acid sequences. For example, the expressible nucleic acid sequence disclosed herein can be part of a plasmid and thus the nucleic acid molecule is a plasmid comprising such an expressible nucleic acid sequence. In some embodiments, provided herein is a vector or plasmid that is capable of expressing at least a monomer of a self-assembling nanoparticle and a viral antigen construct or constructs in the cell of a mammal in a quantity effective to elicit an immune response in the mammal. The vector or plasmid may comprise heterologous nucleic acid encoding the one or more viral antigens (such as SARS-CoV-2 antigens). In some embodiments, provided herein is a vector or plasmid that is capable of expressing at least one soluble trimer of a coronavirus or SARS-CoV-2 envelope polypeptide or constructs in the cell of a mammal in a quantity effective to elicit an immune response in the mammal. In some embodiments, the nucleic acid expresses a trimer of the spike protein of SARS-CoV-2 or a functional fragment or variant thereof. The vector may be a plasmid. The plasmid may be useful for transfecting cells with nucleic acid encoding a viral antigen, which the transformed host cell is cultured and maintained under conditions wherein expression of the viral antigen takes place and wherein the structure of the nanoparticle with the antigen or trimer elicits an immune response of a magnitude greater than and/or more therapeutically effective than the immune response elicited by the antigen alone. The plasmid may further comprise an initiation codon, which may be upstream of the expressible sequence, and a stop codon, which may be downstream of the coding sequence. The initiation and termination codon may be in frame with the expressible sequence.

[0272] The plasmid may also comprise a promoter that is operably linked to the coding sequence. The promoter operably linked to the coding sequence may be a promoter from simian virus 40 (SV40), a mouse mammary tumor virus (MMTV) promoter, a human immunodeficiency virus (HIV) promoter such as the bovine immunodeficiency virus (BIV) long terminal repeat (LTR) promoter, a Moloney virus promoter, an avian leukosis virus (ALV) promoter, a cytomegalovirus (CMV) promoter such as the CMV immediate early promoter, Epstein Barr virus (EBV) promoter, or a Rous sarcoma virus (RSV) promoter. The promoter may also be a promoter from a human gene such as human actin, human myosin, human hemoglobin, human muscle creatine, or human metalothionein. The promoter may also be a tissue specific promoter, such as a muscle or skin specific promoter, natural or synthetic. Examples of such promoters are described in US patent application publication No. US20040175727, the contents of which are incorporated herein in its entirety. The plasmid may also comprise a polyadenylation signal, which may be downstream of the coding sequence. The polyadenylation signal may be a SV40 polyadenylation signal, LTR polyadenylation signal, bovine growth hormone (bGH) polyadenylation signal, human growth hormone (hGH) polyadenylation signal, or human β-globin polyadenylation signal. The SV40 polyadenylation signal may be a polyadenylation signal from a pCEP4 plasmid (Invitrogen, San Diego, Calif.).

[0273] The plasmid may also comprise an enhancer upstream of the coding sequence. The enhancer may be human actin, human myosin, human hemoglobin, human muscle creatine or a viral enhancer such as one from CMV, FMDV, RSV or EBV. Polynucleotide function enhancers are described in U.S. Pat. Nos. 5,593,972, 5,962,428, and WO94/016737, the contents of each are fully incorporated by reference. The plasmid may also comprise a mammalian origin of replication in order to maintain the plasmid extrachromosomally and produce multiple copies of the plasmid in a cell. The plasmid may be pVAX1, pCEP4 or pREP4 from ThermoFisher Scientific (San Diego, Calif.), which may comprise the Epstein Barr virus origin of replication and nuclear antigen EBNA-1 coding region, which may produce high copy episomal replication without integration.

[0274] In some embodiments, the vector can be pVAX1 or a pVax1 variant with changes such as the variant plasmid described herein. The variant pVax1 plasmid is a 2998 basepair variant of the backbone vector plasmid pVAX1 (Invitrogen, Carlsbad Calif.). The CMV promoter is located at bases 137-724. The T7 promoter/priming site is at bases 664-683. Multiple cloning sites are at bases 696-811. Bovine GH polyadenylation signal is at bases 829-1053. The Kanamycin resistance gene is at bases 1226-2020. The pUC origin is at bases 2320-2993. The vaccine may comprise the consensus antigens and plasmids at quantities of from about 1 nanogram to 100 milligrams; about 1 microgram to about 10 milligrams; or preferably about 0.1 microgram to about 10 milligrams; or more preferably about 1 milligram to about 2 milligram. In some embodiments, pharmaceutical compositions according to the present disclosure comprise from about 1 nanogram to about 1000 micrograms of DNA. The nucleic acid sequence for the pVAX1 backbone sequence is as follows:

(SEQ ID NO: 161)
gactcttcgcgatgtacgggccagatatacgcgttgacattgattattga
ctagttattaatagtaatcaattacggggtcattagttcatagcccatat
atggagttccgcgttacataacttacggtaaatggcccgcctggctgacc
gcccaacgacccccgcccattgacgtcaataatgacgtatgttcccatag
taacgccaatagggactttccattgacgtcaatgggtggactatttacgg
taaactgcccacttggcagtacatcaagtgtatcatatgccaagtacgcc
ccctattgacgtcaatgacggtaaatggcccgcctggcattatgcccagt
acatgaccttatgggactttcctacttggcagtacatctacgtattagtc
atcgctattaccatggtgatgcggttttggcagtacatcaatgggcgtgg
atagcggtttgactcacggggatttccaagtctccaccccattgacgtca
atgggagtttgttttggcaccaaaatcaacgggactttccaaaatgtcgt
aacaactccgccccattgacgcaaatgggcggtaggcgtgtacggtggga
ggtctatataagcagagctctctggctaactagagaacccactgcttact
ggcttatcgaaattaatacgactcactatagggagacccaagctggctag
cgtttaaacttaagcttggtaccgagctcggatccactagtccagtgtgg
tggaattctgcagatatccagcacagtggcggccgctcgagtctagaggg
cccgtttaaacccgctgatcagcctcgactgtgccttctagttgccagcc
atctgttgtttgcccctcccccgtgccttccttgaccctggaaggtgcca
ctcccactgtcctttcctaataaaatgaggaaattgcatcgcattgtctg
agtaggtgtcattctattctggggggtggggtggggcaggacagcaaggg
ggaggattgggaagacaatagcaggcatgctggggatgcggtgggctcta
tggcttctactgggcggttttatggacagcaagcgaaccggaattgccag
ctggggcgccctctggtaaggttgggaagccctgcaaagtaaactggatg
gctttctcgccgccaaggatctgatggcgcaggggatcaagctctgatca
agagacaggatgaggatcgtttcgcatgattgaacaagatggattgcacg
caggttctccggccgcttgggtggagaggctattcggctatgactgggca
caacagacaatcggctgctctgatgccgccgtgttccggctgtcagcgca
ggggcgcccggttctttttgtcaagaccgacctgtccggtgccctgaatg
aactgcaagacgaggcagcgcggctatcgtggctggccacgacgggcgtt
ccttgcgcagctgtgctcgacgttgtcactgaagcgggaagggactggct
gctattgggcgaagtgccggggcaggatctcctgtcatctcaccttgctc
ctgccgagaaagtatccatcatggctgatgcaatgcggcggctgcatacg
cttgatccggctacctgcccattcgaccaccaagcgaaacatcgcatcga
gcgagcacgtactcggatggaagccggtcttgtcgatcaggatgatctgg
acgaagagcatcaggggctcgcgccagccgaactgttcgccaggctcaag
gcgagcatgcccgacggcgaggatctcgtcgtgacccatggcgatgcctg
cttgccgaatatcatggtggaaaatggccgcttttctggattcatcgact
gtggccggctgggtgtggcggaccgctatcaggacatagcgttggctacc
cgtgatattgctgaagagcttggcggcgaatgggctgaccgcttcctcgt
gctttacggtatcgccgctcccgattcgcagcgcatcgccttctatcgcc
ttcttgacgagttcttctgaattattaacgcttacaatttcctgatgcgg
tattttctccttacgcatctgtgcggtatttcacaccgcatacaggtggc
acttttcggggaaatgtgcgcggaacccctatttgtttatttttctaaat
acattcaaatatgtatccgctcatgagacaataaccctgataaatgcttc
aataatagcacgtgctaaaacttcatttttaatttaaaaggatctaggtg
aagatcctttttgataatctcatgaccaaaatcccttaacgtgagttttc
gttccactgagcgtcagaccccgtagaaaagatcaaaggatcttcttgag
atcctttttttctgcgcgtaatctgctgcttgcaaacaaaaaaaccaccg
ctaccagcggtggtttgtttgccggatcaagagctaccaactctttttcc
gaaggtaactggcttcagcagagcgcagataccaaatactgtccttctag
tgtagccgtagttaggccaccacttcaagaactctgtagcaccgcctaca
tacctcgctctgctaatcctgttaccagtggctgctgccagtggcgataa
gtcgtgtcttaccgggttggactcaagacgatagttaccggataaggcgc
agcggtcgggctgaacggggggttcgtgcacacagcccagcttggagcga
acgacctacaccgaactgagatacctacagcgtgagctatgagaaagcgc
cacgcttcccgaagggagaaaggcggacaggtatccggtaagcggcaggg
tcggaacaggagagcgcacgagggagcttccagggggaaacgcctggtat
ctttatagtcctgtcgggtttcgccacctctgacttgagcgtcgattttt
gtgatgctcgtcaggggggcggagcctatggaaaaacgccagcaacgcgg
cctttttacggttcctgggcttttgctggccttttgctcacatgttctt

[0275] Other vectors or plasmids that can be used herein to produce the vaccine of the present disclosure include, but not limited to, pcDNA3.1(+), pCI mammalian expression vector, pSI vector, pZeoSV2(+), phCMV1, pTCP and pIRES with their respective backbone sequence as follows.

The pcDNA3.1(+) backbone sequence (SEQ ID NO: 162):
gacggatcgggagatctcccgatcccctatggtgcactctcagtacaatctgctctgatgccgcatagttaagccagtatctgctccctg
cttgtgtgttggaggtcgctgagtagtgcgcgagcaaaatttaagctacaacaaggcaaggcttgaccgacaattgcatgaagaatctg
cttagggttaggcgttttgcgctgcttcgcgatgtacgggccagatatacgcgttgacattgattattgactagttattaatagtaatcaatta
cggggtcattagttcatagcccatatatggagttccgcgttacataacttacggtaaatggcccgcctggctgaccgcccaacgacccc
cgcccattgacgtcaataatgacgtatgttcccatagtaacgccaatagggactttccattgacgtcaatgggtggagtatttacggtaaa
ctgcccacttggcagtacatcaagtgtatcatatgccaagtacgccccctattgacgtcaatgacggtaaatggcccgcctggcattatg
cccagtacatgaccttatgggactttcctacttggcagtacatctacgtattagtcatcgctattaccatggtgatgcggttttggcagtaca
tcaatgggcgtggatagcggtttgactcacggggatttccaagtctccaccccattgacgtcaatgggagtttgttttggcaccaaaatca
acgggactttccaaaatgtcgtaacaactccgccccattgacgcaaatgggcggtaggcgtgtacggtgggaggtctatataagcaga
gctctctggctaactagagaacccactgcttactggcttatcgaaattaatacgactcactatagggagacccaagctggctagcgttta
aacttaagcttggtaccgagctcggatccactagtccagtgtggtggaattctgcagatatccagcacagtggcggccgctcgagtcta
gagggcccgtttaaacccgctgatcagcctcgactgtgccttctagttgccagccatctgttgtttgcccctcccccgtgccttccttgac
cctggaaggtgccactcccactgtcctttcctaataaaatgaggaaattgcatcgcattgtctgagtaggtgtcattctattctggggggtg
gggtggggcaggacagcaagggggaggattgggaagacaatagcaggcatgctggggatgcggtgggctctatggcttctgagg
cggaaagaaccagctggggctctagggggtatccccacgcgccctgtagcggcgcattaagcgcggcgggtgtggtggttacgcg
cagcgtgaccgctacacttgccagcgccctagcgcccgctcctttcgctttcttcccttcctttctcgccacgttcgccggctttccccgtc
aagctctaaatcgggggctccctttagggttccgatttagtgctttacggcacctcgaccccaaaaaacttgattagggtgatggttcacg
tagtgggccatcgccctgatagacggtttttcgccctttgacgttggagtccacgttctttaatagtggactcttgttccaaactggaacaa
cactcaaccctatctcggtctattcttttgatttataagggattttgccgatttcggcctattggttaaaaaatgagctgatttaacaaaaattta
acgcgaattaattctgtggaatgtgtgtcagttagggtgtggaaagtccccaggctccccagcaggcagaagtatgcaaagcatgcat
ctcaattagtcagcaaccaggtgtggaaagtccccaggctccccagcaggcagaagtatgcaaagcatgcatctcaattagtcagcaa
ccatagtcccgcccctaactccgcccatcccgcccctaactccgcccagttccgcccattctccgccccatggctgactaattttttttattt
atgcagaggccgaggccgcctctgcctctgagctattccagaagtagtgaggaggcttttttggaggcctaggcttttgcaaaaagctc
ccgggagcttgtatatccattttcggatctgatcaagagacaggatgaggatcgtttcgcatgattgaacaagatggattgcacgcaggt
tctccggccgcttgggtggagaggctattcggctatgactgggcacaacagacaatcggctgctctgatgccgccgtgttccggctgt
cagcgcaggggcgcccggttctttttgtcaagaccgacctgtccggtgccctgaatgaactgcaggacgaggcagcgcggctatcgt
ggctggccacgacgggcgttccttgcgcagctgtgctcgacgttgtcactgaagcgggaagggactggctgctattgggcgaagtgc
cggggcaggatctcctgtcatctcaccttgctcctgccgagaaagtatccatcatggctgatgcaatgcggcggctgcatacgcttgat
ccggctacctgcccattcgaccaccaagcgaaacatcgcatcgagcgagcacgtactcggatggaagccggtcttgtcgatcaggat
gatctggacgaagagcatcaggggctcgcgccagccgaactgttcgccaggctcaaggcgcgcatgcccgacggcgaggatctcg
tcgtgacccatggcgatgcctgcttgccgaatatcatggtggaaaatggccgcttttctggattcatcgactgtggccggctgggtgtgg
cggaccgctatcaggacatagcgttggctacccgtgatattgctgaagagcttggcggcgaatgggctgaccgcttcctcgtgctttac
ggtatcgccgctcccgattcgcagcgcatcgccttctatcgccttcttgacgagttcttctgagcgggactctggggttcgaaatgaccg
accaagcgacgcccaacctgccatcacgagatttcgattccaccgccgccttctatgaaaggttgggcttcggaatcgttttccgggac
gccggctggatgatcctccagcgcggggatctcatgctggagttcttcgcccaccccaacttgtttattgcagcttataatggttacaaat
aaagcaatagcatcacaaatttcacaaataaagcatttttttcactgcattctagttgtggtttgtccaaactcatcaatgtatcttatcatgtct
gtataccgtcgacctctagctagagcttggcgtaatcatggtcatagctgtttcctgtgtgaaattgttatccgctcacaattccacacaac
atacgagccggaagcataaagtgtaaagcctggggtgcctaatgagtgagctaactcacattaattgcgttgcgctcactgcccgctttc
cagtcgggaaacctgtcgtgccagctgcattaatgaatcggccaacgcgcggggagaggcggtttgcgtattgggcgctcttccgctt
cctcgctcactgactcgctgcgctcggtcgttcggctgcggcgagcggtatcagctcactcaaaggcggtaatacggttatccacaga
atcaggggataacgcaggaaagaacatgtgagcaaaaggccagcaaaaggccaggaaccgtaaaaaggccgcgttgctggcgttt
ttccataggctccgcccccctgacgagcatcacaaaaatcgacgctcaagtcagaggtggcgaaacccgacaggactataaagatac
caggcgtttccccctggaagctccctcgtgcgctctcctgttccgaccctgccgcttaccggatacctgtccgcctttctcccttcgggaa
gcgtggcgctttctcatagctcacgctgtaggtatctcagttcggtgtaggtcgttcgctccaagctgggctgtgtgcacgaaccccccg
ttcagcccgaccgctgcgccttatccggtaactatcgtcttgagtccaacccggtaagacacgacttatcgccactggcagcagccact
ggtaacaggattagcagagcgaggtatgtaggcggtgctacagagttcttgaagtggtggcctaactacggctacactagaagaaca
gtatttggtatctgcgctctgctgaagccagttaccttcggaaaaagagttggtagctcttgatccggcaaacaaaccaccgctggtagc
ggtttttttgtttgcaagcagcagattacgcgcagaaaaaaaggatctcaagaagatcctttgatcttttctacggggtctgacgctcagtg
gaacgaaaactcacgttaagggattttggtcatgagattatcaaaaaggatcttcacctagatccttttaaattaaaaatgaagttttaaatc
aatctaaagtatatatgagtaaacttggtctgacagttaccaatgcttaatcagtgaggcacctatctcagcgatctgtctatttcgttcatcc
atagttgcctgactccccgtcgtgtagataactacgatacgggagggcttaccatctggccccagtgctgcaatgataccgcgagacc
cacgctcaccggctccagatttatcagcaataaaccagccagccggaagggccgagcgcagaagtggtcctgcaactttatccgcct
ccatccagtctattaattgttgccgggaagctagagtaagtagttcgccagttaatagtttgcgcaacgttgttgccattgctacaggcatc
gtggtgtcacgctcgtcgtttggtatggcttcattcagctccggttcccaacgatcaaggcgagttacatgatcccccatgttgtgcaaaa
aagcggttagctccttcggtcctccgatcgttgtcagaagtaagttggccgcagtgttatcactcatggttatggcagcactgcataattct
cttactgtcatgccatccgtaagatgcttttctgtgactggtgagtactcaaccaagtcattctgagaatagtgtatgcggcgaccgagttg
ctcttgcccggcgtcaatacgggataataccgcgccacatagcagaactttaaaagtgctcatcattggaaaacgttcttcggggcgaa
aactctcaaggatcttaccgctgttgagatccagttcgatgtaacccactcgtgcacccaactgatcttcagcatcttttactttcaccagc
gtttctgggtgagcaaaaacaggaaggcaaaatgccgcaaaaaagggaataagggcgacacggaaatgttgaatactcatactcttc
ctttttcaatattattgaagcatttatcagggttattgtctcatgagcggatacatatttgaatgtatttagaaaaataaacaaataggggttcc
gcgcacatttccccgaaaagtgccacctgacgtc
The pCI mammalian expression vector backbone sequence (SEQ ID NO: 163):
tcaatattggccattagccatattattcattggttatatagcataaatcaatattggctattggccattgcatacgttgtatctatatcataatatg
tacatttatattggctcatgtccaatatgaccgccatgttggcattgattattgactagttattaatagtaatcaattacggggtcattagttcat
agcccatatatggagttccgcgttacataacttacggtaaatggcccgcctggctgaccgcccaacgacccccgcccattgacgtcaat
aatgacgtatgttcccatagtaacgccaatagggactttccattgacgtcaatgggtggagtatttacggtaaactgcccacttggcagta
catcaagtgtatcatatgccaagtccgccccctattgacgtcaatgacggtaaatggcccgcctggcattatgcccagtacatgacctta
cgggactttcctacttggcagtacatctacgtattagtcatcgctattaccatggtgatgcggttttggcagtacaccaatgggcgtggata
gcggtttgactcacggggatttccaagtctccaccccattgacgtcaatgggagtttgttttggcaccaaaatcaacgggactttccaaaa
tgtcgtaataaccccgccccgttgacgcaaatgggcggtaggcgtgtacggtgggaggtctatataagcagagctcgtttagtgaacc
gtcagatcactagaagctttattgcggtagtttatcacagttaaattgctaacgcagtcagtgcttctgacacaacagtctcgaacttaagc
tgcagaagttggtcgtgaggcactgggcaggtaagtatcaaggttacaagacaggtttaaggagaccaatagaaactgggcttgtcga
gacagagaagactcttgcgtttctgataggcacctattggtcttactgacatccactttgcctttctctccacaggtgtccactcccagttca
attacagctcttaaggctagagtacttaatacgactcactataggctagcctcgagaattcacgcgtggtacctctagagtcgacccggg
cggccgcttcgagcagacatgataagatacattgatgagtttggacaaaccacaactagaatgcagtgaaaaaaatgctttatttgtgaa
atttgtgatgctattgctttatttgtaaccattataagctgcaataaacaagttaacaacaacaattgcattcattttatgtttcaggttcagggg
gagatgtgggaggttttttaaagcaagtaaaacctctacaaatgtggtaaaatcgataaggatccgggctggcgtaatagcgaagagg
cccgcaccgatcgcccttcccaacagttgcgcagcctgaatggcgaatggacgcgccctgtagcggcgcattaagcgcggcgggtg
tggtggttacgcgcagcgtgaccgctacacttgccagcgccctagcgcccgctcctttcgctttcttcccttcctttctcgccacgttcgc
cggctttccccgtcaagctctaaatcgggggctccctttagggttccgatttagtgctttacggcacctcgaccccaaaaaacttgattag
ggtgatggttcacgtagtgggccatcgccctgatagacggtttttcgccctttgacgttggagtccacgttctttaatagtggactcttgttc
caaactggaacaacactcaaccctatctcggtctattcttttgatttataagggattttgccgatttcggcctattggttaaaaaatgagctga
tttaacaaaaatttaacgcgaattttaacaaaatattaacgcttacaatttcctgatgcggtattttctccttacgcatctgtgcggtatttcaca
ccgcatatggtgcactctcagtacaatctgctctgatgccgcatagttaagccagccccgacacccgccaacacccgctgacgcgccc
tgacgggcttgtctgctcccggcatccgcttacagacaagctgtgaccgtctccgggagctgcatgtgtcagaggttttcaccgtcatca
ccgaaacgcgcgagacgaaagggcctcgtgatacgcctatttttataggttaatgtcatgataataatggtttcttagacgtcaggtggca
cttttcggggaaatgtgcgcggaacccctatttgtttatttttctaaatacattcaaatatgtatccgctcatgagacaataaccctgataaat
cacccagaaacgctggtgaaagtaaaagatgctgaagatcagttgggtgcacgagtgggttacatcgaactggatctcaacagcggt
aagatccttgagagttttcgccccgaagaacgttttccaatgatgagcacttttaaagttctgctatgtggcgcggtattatcccgtattgac
gccgggcaagagcaactcggtcgccgcatacactattctcagaatgacttggttgagtactcaccagtcacagaaaagcatcttacgg
atggcatgacagtaagagaattatgcagtgctgccataaccatgagtgataacactgcggccaacttacttctgacaacgatcggagga
ccgaaggagctaaccgcttttttgcacaacatgggggatcatgtaactcgccttgatcgttgggaaccggagctgaatgaagccatacc
aaacgacgagcgtgacaccacgatgcctgtagcaatggcaacaacgttgcgcaaactattaactggcgaactacttactctagcttccc
ggcaacaattaatagactggatggaggcggataaagttgcaggaccacttctgcgctcggcccttccggctggctggtttattgctgat
aaatctggagccggtgagcgtgggtctcgcggtatcattgcagcactggggccagatggtaagccctcccgtatcgtagttatctacac
gacggggagtcaggcaactatggatgaacgaaatagacagatcgctgagataggtgcctcactgattaagcattggtaactgtcagac
caagtttactcatatatactttagattgatttaaaacttcatttttaatttaaaaggatctaggtgaagatcctttttgataatctcatgaccaaaa
tcccttaacgtgagttttcgttccactgagcgtcagaccccgtagaaaagatcaaaggatcttcttgagatcctttttttctgcgcgtaatct
gctgcttgcaaacaaaaaaaccaccgctaccagcggtggtttgtttgccggatcaagagctaccaactctttttccgaaggtaactggct
tcagcagagcgcagataccaaatactgttcttctagtgtagccgtagttaggccaccacttcaagaactctgtagcaccgcctacatacc
tcgctctgctaatcctgttaccagtggctgctgccagtggcgataagtcgtgtcttaccgggttggactcaagacgatagttaccggata
aggcgcagcggtcgggctgaacggggggttcgtgcacacagcccagcttggagcgaacgacctacaccgaactgagatacctaca
gcgtgagctatgagaaagcgccacgcttcccgaagggagaaaggcggacaggtatccggtaagcggcagggtcggaacaggag
agcgcacgagggagcttccagggggaaacgcctggtatctttatagtcctgtcgggtttcgccacctctgacttgagcgtcgatttttgt
gatgctcgtcaggggggcggagcctatggaaaaacgccagcaacgcggcctttttacggttcctggccttttgctggccttttgctcac
atggctcgacagatct
The pSI vector backbone sequence (SEQ ID NO: 164):
gcgcagcaccatggcctgaaataacctctgaaagaggaacttggttaggtaccttctgaggcggaaagaaccagctgtggaatgtgtg
tcagttagggtgtggaaagtccccaggctccccagcaggcagaagtatgcaaagcatgcatctcaattagtcagcaaccaggtgtgg
aaagtccccaggctccccagcaggcagaagtatgcaaagcatgcatctcaattagtcagcaaccatagtcccgcccctaactccgcc
catcccgcccctaactccgcccagttccgcccattctccgccccatggctgactaattttttttatttatgcagaggccgaggccgcctcg
gcctctgagctattccagaagtagtgaggaggcttttttggaggcctaggcttttgcaaaaagcttgattcttctgacacaacagtctcga
acttaagctgcagaagttggtcgtgaggcactgggcaggtaagtatcaaggttacaagacaggtttaaggagaccaatagaaactgg
gcttgtcgagacagagaagactcttgcgtttctgataggcacctattggtcttactgacatccactttgcctttctctccacaggtgtccact
cccagttcaattacagctcttaaggctagagtacttaatacgactcactataggctagcctcgagaattcacgcgtggtacctctagagtc
gacccgggcggccgcttcgagcagacatgataagatacattgatgagtttggacaaaccacaactagaatgcagtgaaaaaaatgctt
tatttgtgaaatttgtgatgctattgctttatttgtaaccattataagctgcaataaacaagttaacaacaacaattgcattcattttatgtttcag
gttcagggggaggtgtgggaggttttttaaagcaagtaaaacctctacaaatgtggtaaaatcgataaggatccgggctggcgtaatag
cgaagaggcccgcaccgatcgcccttcccaacagttgcgcagcctgaatggcgaatggacgcgccctgtagcggcgcattaagcg
cggcgggtgtggtggttacgcgcagcgtgaccgctacacttgccagcgccctagcgcccgctcctttcgctttcttcccttcctttctcgc
cacgttcgccggctttccccgtcaagctctaaatcgggggctccctttagggttccgatttagtgctttacggcacctcgaccccaaaaa
acttgattagggtgatggttcacgtagtgggccatcgccctgatagacggtttttcgccctttgacgttggagtccacgttctttaatagtg
gactcttgttccaaactggaacaacactcaaccctatctcggtctattcttttgatttataagggattttgccgatttcggcctattggttaaaa
aatgagctgatttaacaaaaatttaacgcgaattttaacaaaatattaacgcttacaatttcctgatgcggtattttctccttacgcatctgtgc
ggtatttcacaccgcatatggtgcactctcagtacaatctgctctgatgccgcatagttaagccagccccgacacccgccaacacccgc
tgacgcgccctgacgggcttgtctgctcccggcatccgcttacagacaagctgtgaccgtctccgggagctgcatgtgtcagaggtttt
caccgtcatcaccgaaacgcgcgagacgaaagggcctcgtgatacgcctatttttataggttaatgtcatgataataatggtttcttagac
gtcaggtggcacttttcggggaaatgtgcgcggaacccctatttgtttatttttctaaatacattcaaatatgtatccgctcatgagacaata
accctgataaatgcttcaataatattgaaaaaggaagagtatgagtattcaacatttccgtgtcgcccttattcccttttttgcggcattttgcc
ttcctgtttttgctcacccagaaacgctggtgaaagtaaaagatgctgaagatcagttgggtgcacgagtgggttacatcgaactggatc
tcaacagcggtaagatccttgagagttttcgccccgaagaacgttttccaatgatgagcacttttaaagttctgctatgtggcgcggtatta
tcccgtattgacgccgggcaagagcaactcggtcgccgcatacactattctcagaatgacttggttgagtactcaccagtcacagaaaa
gcatcttacggatggcatgacagtaagagaattatgcagtgctgccataaccatgagtgataacactgcggccaacttacttctgacaac
gatcggaggaccgaaggagctaaccgcttttttgcacaacatgggggatcatgtaactcgccttgatcgttgggaaccggagctgaat
gaagccataccaaacgacgagcgtgacaccacgatgcctgtagcaatggcaacaacgttgcgcaaactattaactggcgaactactt
actctagcttcccggcaacaattaatagactggatggaggcggataaagttgcaggaccacttctgcgctcggcccttccggctggctg
gtttattgctgataaatctggagccggtgagcgtgggtctcgcggtatcattgcagcactggggccagatggtaagccctcccgtatcgt
agttatctacacgacggggagtcaggcaactatggatgaacgaaatagacagatcgctgagataggtgcctcactgattaagcattggt
aactgtcagaccaagtttactcatatatactttagattgatttaaaacttcatttttaatttaaaaggatctaggtgaagatcctttttgataatct
catgaccaaaatcccttaacgtgagttttcgttccactgagcgtcagaccccgtagaaaagatcaaaggatcttcttgagatcctttttttct
gcgcgtaatctgctgcttgcaaacaaaaaaaccaccgctaccagcggtggtttgtttgccggatcaagagctaccaactctttttccgaa
ggtaactggcttcagcagagcgcagataccaaatactgttcttctagtgtagccgtagttaggccaccacttcaagaactctgtagcacc
gcctacatacctcgctctgctaatcctgttaccagtggctgctgccagtggcgataagtcgtgtcttaccgggttggactcaagacgata
gttaccggataaggcgcagcggtcgggctgaacggggggttcgtgcacacagcccagcttggagcgaacgacctacaccgaactg
agatacctacagcgtgagctatgagaaagcgccacgcttcccgaagggagaaaggcggacaggtatccggtaagcggcagggtcg
gaacaggagagcgcacgagggagcttccagggggaaacgcctggtatctttatagtcctgtcgggtttcgccacctctgacttgagcg
tcgatttttgtgatgctcgtcaggggggcggagcctatggaaaaacgccagcaacgcggcctttttacggttcctggccttttgctggcc
ttttgctcacatggctcgacagatct
The pZeoSV2(+) backbone sequence (SEQ ID NO: 165):
ggatcgatccggctgtggaatgtgtgtcagttagggtgtggaaagtccccaggctccccagcaggcagaagtatgcaaagcatgcat
ctcaattagtcagcaaccaggtgtggaaagtccccaggctccccagcaggcagaagtatgcaaagcatgcatctcaattagtcagcaa
ccatagtcccgcccctaactccgcccatcccgcccctaactccgcccagttccgcccattctccgccccatggctgactaattttttttattt
atgcagaggccgaggccgcctcggcctctgagctattccagaagtagtgaggaggcttttttggaggcctaggcttttgcaaaaagctc
tctggctaactagagaacccactgcttactggcttatcgaaattaatacgactcactatagggagacccaagctggctagcgtttaaactt
aagcttggtaccgagctcggatccactagtccagtgtggtggaattctgcagatatccagcacagtggcggccgctcgagtctagagg
gcccgtttaaacccgctgatcagcctcgactgtgccttctagttgccagccatctgttgtttgcccctcccccgtgccttccttgaccctgg
aaggtgccactcccactgtcctttcctaataaaatgaggaaattgcatcgcattgtctgagtaggtgtcattctattctggggggtggggt
ggggcaggacagcaagggggaggattgggaagacaatagcaggcatgctggggatgcggtgggctctatggcttctgaggcgga
aagaaccagcatgtgagcaaaaggccagcaaaaggccaggaaccgtaaaaaggccgcgttgctggcgtttttccataggctccgcc
cccctgacgagcatcacaaaaatcgacgctcaagtcagaggtggcgaaacccgacaggactataaagataccaggcgtttccccctg
gaagctccctcgtgcgctctcctgttccgaccctgccgcttaccggatacctgtccgcctttctcccttcgggaagcgtggcgctttctca
tagctcacgctgtaggtatctcagttcggtgtaggtcgttcgctccaagctgggctgtgtgcacgaaccccccgttcagcccgaccgct
gcgccttatccggtaactatcgtcttgagtccaacccggtaagacacgacttatcgccactggcagcagccactggtaacaggattagc
agagcgaggtatgtaggcggtgctacagagttcttgaagtggtggcctaactacggctacactagaagaacagtatttggtatctgcgc
tctgctgaagccagttaccttcggaaaaagagttggtagctcttgatccggcaaacaaaccaccgctggtagcggtggtttttttgtttgc
aagcagcagattacgcgcagaaaaaaaggatctcaagaagatcctttgatcttttctacggggtctgacgctcagtggaacgaaaactc
acgttaagggattttggtcatgacattaacctataaaaataggcgtatcacgaggccctttcgtctcgcgcgtttcggtgatgacggtgaa
aacctctgacacatgcagctcccggagacggtcacagcttgtctgtaagcggatgccgggagcagacaagcccgtcagggcgcgtc
agcgggtgttggcgggtgtcggggctggcttaactatgcggcatcagagcagattgtactgagagtgcaccatatgcggtgtgaaata
ccgcacagatgcgtaaggagaaaataccgcatcaggacgcgccctgtagcggcgcattaagcgcggcgggtgtggtggttacgcg
cagcgtgaccgctacacttgccagcgccctagcgcccgctcctttcgctttcttcccttcctttctcgccacgttcgccggctttccccgtc
aagctctaaatcgggggctccctttagggttccgatttagtgctttacggcacctcgaccccaaaaaacttgattagggtgatggttcacg
tagtgggccatcgccctgatagacggtttttcgccctttgacgttggagtccacgttctttaatagtggactcttgttccaaactggaacaa
cactcaaccctatctcggtctattcttttgatttataagggattttgccgatttcggcctattggttaaaaaatgagctgatttaacaaaaattta
acgcgaattttaacaaaatattaacgcttacaatttccattcgccattcaggctgaactagatctagagtccgttacataacttacggtaaat
ggcccgcctggctgaccgcccaacgacccccgcccattgacgtcaataatgacgtatgttcccatagtaacgccaatagggactttcc
attgacgtcaatgggtggagtatttacggtaaactgcccacttggcagtacatcaagtgtatcatatgccaagtacgccccctattgacgt
caatgacggtaaatggcccgcctggcattatgcccagtacatgaccttatgggactttcctacttggcagtacatctacgtattagtcatc
gctattaccatggtgatgcggttttggcagtacatcaatgggcgtggatagcggtttgactcacggggatttccaagtctccaccccattg
acgtcaatgggagtttgttttggcaccaaaatcaacgggactttccaaaatgtcgtaacaactccgccccattgacgcaaatgggcggt
aggcgtgtacggtgggaggtctatataagcagagctcgtttagtgaaccgtcagatcgcctggagacgccatccacgctgttttgacct
ccatagaagacaccgggaccgatccagcctccgcggccgggaacggtgcattggaacggaccgtgttgacaattaatcatcggcat
agtatatcggcatagtataatacgacaaggtgaggaactaaaccatggccaagttgaccagtgccgttccggtgctcaccgcgcgcga
cgtcgccggagcggtcgagttctggaccgaccggctcgggttctcccgggacttcgtggaggacgacttcgccggtgtggtccggg
acgacgtgaccctgttcatcagcgcggtccaggaccaggtggtgccggacaacaccctggcctgggtgtgggtgcgcggcctgga
cgagctgtacgccgagtggtcggaggtcgtgtccacgaacttccgggacgcctccgggccggccatgaccgagatcggcgagcag
ccgtggggggggagttcgccctgcgcgacccggccggcaactgcgtgcacttcgtggccgaggagcaggactgacactcgacct
cgaaacttgtttattgcagcttataatggttacaaataaagcaatagcatcacaaatttcacaaataaagcatttttttcactgcattctagttg
tggtttgtccaaactcatcaatgtatcttatcatgtct
The phCMV1 backbone sequence (SEQ ID NO: 166):
tagttattaatagtaatcaattacggggtcattagttcatagcccatatatggagttccgcgttacataacttacggtaaatggcccgcctgg
ctgaccgcccaacgacccccgcccattgacgtcaataatgacgtatgttcccatagtaacgccaatagggactttccattgacgtcaatg
ggtggagtatttacggtaaactgcccacttggcagtacatcaagtgtatcatatgccaagtacgccccctattgacgtcaatgacggtaa
atggcccgcctggcattatgcccagtacatgaccttatgggactttcctacttggcagtacatctacgtattagtcatcgctattaccatggt
gatgcggttttggcagtacatcaatgggcgtggatagcggtttgactcacggggatttccaagtctccaccccattgacgtcaatggga
gtttgttttggcaccaaaatcaacgggactttccaaaatgtcgtaacaactccgccccattgacgcaaatgggcggtaggcgtgtacggt
gggaggtctatataagcagagctcgtttagtgaaccgtcagatcgcctggagacgccatccacgctgttttgacctccatagaagacac
cgggaccgatccagcctccgcggccgggaacggtgcattggaacgcggattccccgtgccaagagtgacgtaagtaccgcctatag
actctataggcacacccctttggctcttatgcatgaattaatacgactcactatagggagacagactgttcctttcctgggtcttttctgcag
gcaccgtcgtcgacttaacagatctcgagctcaagcttcgaattctgcagtcgacggtaccgcgggcccgggatccaccgggtacaa
gtaaagcggccgcgactctagatcataatcagccataccacatttgtagaggttttacttgctttaaaaaacctcccacacctccccctga
acctgaaacataaaatgaatgcaattgttgttgttaacttgtttattgcagcttataatggttacaaataaagcaatagcatcacaaatttcac
aaataaagcatttttttcactgcattctagttgtggtttgtccaaactcatcaatgtatcttaaggcgtaaattgtaagcgttaatattttgttaaa
attcgcgttaaatttttgttaaatcagctcattttttaaccaataggccgaaatcggcaaaatcccttataaatcaaaagaatagaccgagat
agggttgagtgttgttccagtttggaacaagagtccactattaaagaacgtggactccaacgtcaaagggcgaaaaaccgtctatcagg
gcgatggcccactacgtgaaccatcaccctaatcaagttttttggggtcgaggtgccgtaaagcactaaatcggaaccctaaagggag
cccccgatttagagcttgacggggaaagccggcgaacgtggcgagaaaggaagggaagaaagcgaaaggagcgggcgctagg
gcgctggcaagtgtagcggtcacgctgcgcgtaaccaccacacccgccgcgcttaatgcgccgctacagggcgcgtcaggtggca
cttttcggggaaatgtgcgcggaacccctatttgtttatttttctaaatacattcaaatatgtatccgctcatgagacaataaccctgataaat
gcttcaataatattgaaaaaggaagagtcctgaggcggaaagaaccagctgtggaatgtgtgtcagttagggtgtggaaagtccccag
gctccccagcaggcagaagtatgcaaagcatgcatctcaattagtcagcaaccaggtgtggaaagtccccaggctccccagcaggc
agaagtatgcaaagcatgcatctcaattagtcagcaaccatagtcccgcccctaactccgcccatcccgcccctaactccgcccagttc
cgcccattctccgccccatggctgactaattttttttatttatgcagaggccgaggccgcctcggcctctgagctattccagaagtagtga
ggaggcttttttggaggcctaggcttttgcaaagatcgatcaagagacaggatgaggatcgtttcgcatgattgaacaagatggattgca
cgcaggttctccggccgcttgggtggagaggctattcggctatgactgggcacaacagacaatcggctgctctgatgccgccgtgttc
cggctgtcagcgcaggggcgcccggttctttttgtcaagaccgacctgtccggtgccctgaatgaactgcaagacgaggcagcgcg
gctatcgtggctggccacgacgggcgttccttgcgcagctgtgctcgacgttgtcactgaagcgggaagggactggctgctattgggc
gaagtgccggggcaggatctcctgtcatctcaccttgctcctgccgagaaagtatccatcatggctgatgcaatgcggcggctgcatac
caggatgatctggacgaagagcatcaggggctcgcgccagccgaactgttcgccaggctcaaggcgagcatgcccgacggcgag
gatctcgtcgtgacccatggcgatgcctgcttgccgaatatcatggtggaaaatggccgcttttctggattcatcgactgtggccggctg
ggtgtggcggaccgctatcaggacatagcgttggctacccgtgatattgctgaagagcttggcggcgaatgggctgaccgcttcctcg
tgctttacggtatcgccgctcccgattcgcagcgcatcgccttctatcgccttcttgacgagttcttctgagcgggactctggggttcgaa
atgaccgaccaagcgacgcccaacctgccatcacgagatttcgattccaccgccgccttctatgaaaggttgggcttcggaatcgttttc
cgggacgccggctggatgatcctccagcgcggggatctcatgctggagttcttcgcccaccctagggggaggctaactgaaacacg
gaaggagacaataccggaaggaacccgcgctatgacggcaataaaaagacagaataaaacgcacggtgttgggtcgtttgttcataa
acgcggggttcggtcccagggctggcactctgtcgataccccaccgagaccccattggggccaatacgcccgcgtttcttccttttccc
caccccaccccccaagttcgggtgaaggcccagggctcgcagccaacgtcggggcggcaggccctgccatagcctcaggttactc
atatatactttagattgatttaaaacttcatttttaatttaaaaggatctaggtgaagatcctttttgataatctcatgaccaaaatcccttaacgt
gagttttcgttccactgagcgtcagaccccgtagaaaagatcaaaggatcttcttgagatcctttttttctgcgcgtaatctgctgcttgcaa
acaaaaaaaccaccgctaccagcggtggtttgtttgccggatcaagagctaccaactctttttccgaaggtaactggcttcagcagagc
gcagataccaaatactgtccttctagtgtagccgtagttaggccaccacttcaagaactctgtagcaccgcctacatacctcgctctgcta
atcctgttaccagtggctgctgccagtggcgataagtcgtgtcttaccgggttggactcaagacgatagttaccggataaggcgcagcg
gtcgggctgaacggggggttcgtgcacacagcccagcttggagcgaacgacctacaccgaactgagatacctacagcgtgagctat
gagaaagcgccacgcttcccgaagggagaaaggcggacaggtatccggtaagcggcagggtcggaacaggagagcgcacgag
ggagcttccagggggaaacgcctggtatctttatagtcctgtcgggtttcgccacctctgacttgagcgtcgatttttgtgatgctcgtcag
gggggcggagcctatggaaaaacgccagcaacgcggcctttttacggttcctggccttttgctggccttttgctcacatgttctttcctgc
gttatcccctgattctgtggataaccgtattaccgccatgcat
The pTCP backbone sequence (SEQ ID NO: 167):
tagttattaatagtaatcaattacggggtcattagttcatagcccatatatggagttccgcgttacataacttacggtaaatggcccgcctgg
ctgaccgcccaacgacccccgcccattgacgtcaataatgacgtatgttcccatagtaacgccaatagggactttccattgacgtcaatg
ggtggagtatttacggtaaactgcccacttggcagtacatcaagtgtatcatatgccaagtacgccccctattgacgtcaatgacggtaa
atggcccgcctggcattatgcccagtacatgaccttatgggactttcctacttggcagtacatctacgtattagtcatcgctattaccatggt
gatgcggttttggcagtacatcaatgggcgtggatagcggtttgactcacggggatttccaagtctccaccccattgacgtcaatggga
gtttgttttggcaccaaaatcaacgggactttccaaaatgtcgtaacaactccgccccattgacgcaaatgggcggtaggcgtgtacggt
gggaggtctatataagcagagctggtttagtgaaccgtggatcccgtcgcttaccgattcagaatggttgatatccgccattctgaatcg
gtaagcgacgaagcttaataaaggatcttttattttcattggatctgtgtgttggttttttgtgtgcggccgccctcgactgtgccttctagaa
gacaatagcaggcatgctggggatgcggtgggctctatggcttctgaggcggaaagaaccagctggggctctagggggtatcccca
cgcgccctgtagcggcgcattaagcgcggcgggtgtggtggttacgcgcagcgtgaccgctacacttgccagcgccctagcgcccg
ctcctttcgctttcttcccttcctttctcgccacgttcgccggctttccccgtcaagctctaaatcgggggctccctttagggttccgatttagt
gctttacggcacctcgaccccaaaaaacttgattagggtgatggttcacgtagtgggccatcgccctgatagacggtttttcgccctttga
cgttggagtccacgttctttaatagtggactcttgttccaaactggaacaacactcaaccctatctcggtctattcttttgatttataagggatt
ttgccgatttcggcctattggttaaaaaatgagctgatttaacaaaaatttaacgcgaattaattctgtggaatgtgtgtcagttagggtgtg
gaaagtccccaggctccccagcaggcagaagtatgcaaagcatgcatctcaattagtcagcaaccaggtgtggaaagtccccaggct
ccccagcaggcagaagtatgcaaagcatgcatctcaattagtcagcaaccatagtcccgcccctaactccgcccatcccgcccctaac
tccgcccagttccgcccattctccgccccatggctgactaattttttttatttatgcagaggccgaggccgcctctgcctctgagctattcc
agaagtagtgaggaggcttttttggaggcctaggcttttgcaaaaagctcccgggatgaccgagtacaagcccacggtgcgcctcgc
cacccgcgacgacgtcccgcgggccgtacgcaccctcgccgccgcgttcgccgactaccccgccacgcgccacaccgtcgaccc
ggaccgccacatcgagcgggtcaccgagctgcaagaactcttcctcacgcgcgtcgggctcgacatcggcaaggtgtgggtcgcg
gacgacggcgccgcggtggcggtctggaccacgccggagagcgtcgaagcgggggcggtgttcgccgagatcggcccgcgcat
ggccgagttgagcggttcccggctggccgcgcagcaacagatggaaggcctcctggcgccgcaccggcccaaggagcccgcgtg
gttcctggccaccgtcggcgtctcgcccgaccaccagggcaagggtctgggcagcgccgtcgtgctccccggagtggaggcggcc
gagcgcgccggggtgcccgccttcctggagacctccgcgccccgcaacctccccttctacgagcggctcggcttcaccgtcaccgc
cgacgtcgaggtgcccgaaggaccgcgcacctggtgcatgacccgcaagcccggtgcctgattcgaatgaccgaccaagcgacgc
ccaacctgccatcacgagatttcgattccaccgccgccttctatgaaaggttgggcttcggaatcgttttccgggacgccggctggatg
atcctccagcgcggggatctcatgctggagttcttcgcccaccccaacttgtttattgcagcttataatggttacaaataaagcaatagcat
cacaaatttcacaaataaagcatttttttcactgcattctagttgtggtttgtccaaactcatcaatgtatcttatcatgtctgtataccgtcgac
ctctagctagagcttggcgtaatcatggtcatagctgtttcctgtgtgaaattgttatccgctcacaattccacacaacatacgagccggaa
gcataaagtgtaaagcctggggtgcctaatgagtgagctaactcacattaattgcgttgcgctcactgcccgctttccagtcgggaaacc
tgtcgtgccagctgcattaatgaatcggccaacgcgcggggagaggcggtttgcgtattgggcgctcttccgcttcctcgctcactgac
tcgctgcgctcggtcgttcggctgcggcgagcggtatcagctcactcaaaggcggtaatacggttatccacagaatcaggggataac
gcaggaaagaacatgtgagcaaaaggccagcaaaaggccaggaaccgtaaaaaggccgcgttgctggcgtttttccataggctccg
cccccctgacgagcatcacaaaaatcgacgctcaagtcagaggtggcgaaacccgacaggactataaagataccaggcgtttcccc
ctggaagctccctcgtgcgctctcctgttccgaccctgccgcttaccggatacctgtccgcctttctcccttcgggaagcgtggcgctttc
tcatagctcacgctgtaggtatctcagttcggtgtaggtcgttcgctccaagctgggctgtgtgcacgaaccccccgttcagcccgacc
gctgcgccttatccggtaactatcgtcttgagtccaacccggtaagacacgacttatcgccactggcagcagccactggtaacaggatt
agcagagcgaggtatgtaggcggtgctacagagttcttgaagtggtggcctaactacggctacactagaagaacagtatttggtatctg
cgctctgctgaagccagttaccttcggaaaaagagttggtagctcttgatccggcaaacaaaccaccgctggtagcggtttttttgtttgc
aagcagcagattacgcgcagaaaaaaaggatctcaagaagatcctttgatcttttctacggggtctgacgctcagtggaacgaaaactc
acgttaagggattttggtcatgagattatcaaaaaggatcttcacctagatccttttaaattaaaaatgaagttttaaatcaatctaaagtatat
atgagtaaacttggtctgacagttaccaatgcttaatcagtgaggcacctatctcagcgatctgtctatttcgttcatccatagttgcctgact
ccccgtcgtgtagataactacgatacgggagggcttaccatctggccccagtgctgcaatgataccgcgagacccacgctcaccggc
tccagatttatcagcaataaaccagccagccggaagggccgagcgcagaagtggtcctgcaactttatccgcctccatccagtctatta
attgttgccgggaagctagagtaagtagttcgccagttaatagtttgcgcaacgttgttgccattgctacaggcatcgtggtgtcacgctc
gtcgtttggtatggcttcattcagctccggttcccaacgatcaaggcgagttacatgatcccccatgttgtgcaaaaaagcggttagctcc
ttcggtcctccgatcgttgtcagaagtaagttggccgcagtgttatcactcatggttatggcagcactgcataattctcttactgtcatgcca
tccgtaagatgcttttctgtgactggtgagtactcaaccaagtcattctgagaatagtgtatgcggcgaccgagttgctcttgcccggcgt
caatacgggataataccgcgccacatagcagaactttaaaagtgctcatcattggaaaacgttcttcggggcgaaaactctcaaggatc
ttaccgctgttgagatccagttcgatgtaacccactcgtgcacccaactgatcttcagcatcttttactttcaccagcgtttctgggtgagca
aaaacaggaaggcaaaatgccgcaaaaaagggaataagggcgacacggaaatgttgaatactcatactcttcctttttcaatattattga
agcatttatcagggttattgtctcatgagcggatacatatttgaatgtatttagaaaaataaacaaataggggttccgcgcacatttccccg
aaaagtgccacctgacgtcgacggatcgggagatctcccgatcccctatggtgcactctcagtacaatctgctctgatgccgcatagtt
aagccagtatctgctccctgcttgtgtgttggaggtcgctgagtagtgcgcgagcaaaatttaagctacaacaaggcaaggcttgaccg
acaattgcatgaagaatctgcttagggttaggcgttttgcgctgcttcgcgatgtacgggccagatatacgcgttgacattgattattgac
The pIRES backbone sequence (SEQ ID NO: 168):
tcaatattggccattagccatattattcattggttatatagcataaatcaatattggctattggccattgcatacgttgtatctatatcataatatg
tacatttatattggctcatgtccaatatgaccgccatgttggcattgattattgactagttattaatagtaatcaattacggggtcattagttcat
agcccatatatggagttccgcgttacataacttacggtaaatggcccgcctggctgaccgcccaacgacccccgcccattgacgtcaat
aatgacgtatgttcccatagtaacgccaatagggactttccattgacgtcaatgggtggagtatttacggtaaactgcccacttggcagta
catcaagtgtatcatatgccaagtccgccccctattgacgtcaatgacggtaaatggcccgcctggcattatgcccagtacatgacctta
cgggactttcctacttggcagtacatctacgtattagtcatcgctattaccatggtgatgcggttttggcagtacaccaatgggcgtggata
gcggtttgactcacggggatttccaagtctccaccccattgacgtcaatgggagtttgttttggcaccaaaatcaacgggactttccaaaa
tgtcgtaacaactgcgatcgcccgccccgttgacgcaaatgggcggtaggcgtgtacggtgggaggtctatataagcagagctcgttt
agtgaaccgtcagatcactagaagctttattgcggtagtttatcacagttaaattgctaacgcagtcagtgcttctgacacaacagtctcga
acttaagctgcagtgactctcttaaggtagccttgcagaagttggtcgtgaggcactgggcaggtaagtatcaaggttacaagacaggt
ttaaggagaccaatagaaactgggcttgtcgagacagagaagactcttgcgtttctgataggcacctattggtcttactgacatccacttt
gcctttctctccacaggtgtccactcccagttcaattacagctcttaaggctagagtacttaatacgactcactataggctagcctcgagaa
ttcacgcgtcgagcatgcatctagggggccaattccgcccctctcccccccccccctctccctcccccccccctaacgttactggccg
aagccgcttggaataaggccggtgtgcgtttgtctatatgttattttccaccatattgccgtcttttggcaatgtgagggcccggaaacctg
gccctgtcttcttgacgagcattcctaggggtctttcccctctcgccaaaggaatgcaaggtctgttgaatgtcgtgaaggaagcagttcc
tctggaagcttcttgaagacaaacaacgtctgtagcgaccctttgcaggcagcggaaccccccacctggcgacaggtgcctctgcgg
ccaaaagccacgtgtataagatacacctgcaaaggcggcacaaccccagtgccacgttgtgagttggatagttgtggaaagagtcaa
atggctctcctcaagcgtattcaacaaggggctgaaggatgcccagaaggtaccccattgtatgggatctgatctggggcctcggtgc
acatgctttacatgtgtttagtcgaggttaaaaaaacgtctaggccccccgaaccacggggacgtggttttcctttgaaaaacacgatgat
aagcttgccacaacccgggatcctctagagtcgacccgggcggccgcttccctttagtgagggttaatgcttcgagcagacatgataa
gatacattgatgagtttggacaaaccacaactagaatgcagtgaaaaaaatgctttatttgtgaaatttgtgatgctattgctttatttgtaac
cattataagctgcaataaacaagttaacaacaacaattgcattcattttatgtttcaggttcagggggagatgtgggaggttttttaaagcaa
gtaaaacctctacaaatgtggtaaaatccgataaggatcgatccgggctggcgtaatagcgaagaggcccgcaccgatcgcccttcc
caacagttgcgcagcctgaatggcgaatggacgcgccctgtagcggcgcattaagcgcggcgggtgtggtggttacgcgcagcgtg
accgctacacttgccagcgccctagcgcccgctcctttcgctttcttcccttcctttctcgccacgttcgccggctttccccgtcaagctct
aaatcgggggctccctttagggttccgatttagtgctttacggcacctcgaccccaaaaaacttgattagggtgatggttcacgtagtgg
gccatcgccctgatagacggtttttcgccctttgacgttggagtccacgttctttaatagtggactcttgttccaaactggaacaacactca
accctatctcggtctattcttttgatttataagggattttgccgatttcggcctattggttaaaaaatgagctgatttaacaaaaatttaacgcg
aattttaacaaaatattaacgcttacaatttcctgatgcggtattttctccttacgcatctgtgcggtatttcacaccgcatacgcggatctgc
gcagcaccatggcctgaaataacctctgaaagaggaacttggttaggtaccttctgaggcggaaagaaccagctgtggaatgtgtgtc
agttagggtgtggaaagtccccaggctccccagcaggcagaagtatgcaaagcatgcatctcaattagtcagcaaccaggtgtggaa
agtccccaggctccccagcaggcagaagtatgcaaagcatgcatctcaattagtcagcaaccatagtcccgcccctaactccgcccat
cccgcccctaactccgcccagttccgcccattctccgccccatggctgactaattttttttatttatgcagaggccgaggccgcctcggcc
tctgagctattccagaagtagtgaggaggcttttttggaggcctaggcttttgcaaaaagcttgattcttctgacacaacagtctcgaactt
aaggctagagccaccatgattgaacaagatggattgcacgcaggttctccggccgcttgggtggagaggctattcggctatgactggg
cacaacagacaatcggctgctctgatgccgccgtgttccggctgtcagcgcaggggcgcccggttctttttgtcaagaccgacctgtcc
ggtgccctgaatgaactgcaggacgaggcagcgcggctatcgtggctggccacgacgggcgttccttgcgcagctgtgctcgacgtt
gtcactgaagcgggaagggactggctgctattgggcgaagtgccggggcaggatctcctgtcatctcaccttgctcctgccgagaaa
gtatccatcatggctgatgcaatgcggcggctgcatacgcttgatccggctacctgcccattcgaccaccaagcgaaacatcgcatcg
agcgagcacgtactcggatggaagccggtcttgtcgatcaggatgatctggacgaagagcatcaggggctcgcgccagccgaactg
ttcgccaggctcaaggcgcgcatgcccgacggcgaggatctcgtcgtgacccatggcgatgcctgcttgccgaatatcatggtggaa
aatggccgcttttctggattcatcgactgtggccggctgggtgtggcggaccgctatcaggacatagcgttggctacccgtgatattgct
gaagagcttggcggcgaatgggctgaccgcttcctcgtgctttacggtatcgccgctcccgattcgcagcgcatcgccttctatcgcctt
cttgacgagttcttctgagcgggactctggggttcgaaatgaccgaccaagcgacgcccaacctgccatcacgatggccgcaataaa
atatctttattttcattacatctgtgtgttggttttttgtgtgaatcgatagcgataaggatccgcgtatggtgcactctcagtacaatctgctct
gatgccgcatagttaagccagccccgacacccgccaacacccgctgacgcgccctgacgggcttgtctgctcccggcatccgcttac
agacaagctgtgaccgtctccgggagctgcatgtgtcagaggttttcaccgtcatcaccgaaacgcgcgagacgaaagggcctcgtg
atacgcctatttttataggttaatgtcatgataataatggtttcttagacgtcaggtggcacttttcggggaaatgtgcgcggaacccctattt
gtttatttttctaaatacattcaaatatgtatccgctcatgagacaataaccctgataaatgcttcaataatattgaaaaaggaagagtatgag
tattcaacatttccgtgtcgcccttattcccttttttgcggcattttgccttcctgtttttgctcacccagaaacgctggtgaaagtaaaagatg
ctgaagatcagttgggtgcacgagtgggttacatcgaactggatctcaacagcggtaagatccttgagagttttcgccccgaagaacgt
tttccaatgatgagcacttttaaagttctgctatgtggcgcggtattatcccgtattgacgccgggcaagagcaactcggtcgccgcatac
actattctcagaatgacttggttgagtactcaccagtcacagaaaagcatcttacggatggcatgacagtaagagaattatgcagtgctg
ccataaccatgagtgataacactgcggccaacttacttctgacaacgatcggaggaccgaaggagctaaccgcttttttgcacaacatg
ggggatcatgtaactcgccttgatcgttgggaaccggagctgaatgaagccataccaaacgacgagcgtgacaccacgatgcctgta
gcaatggcaacaacgttgcgcaaactattaactggcgaactacttactctagcttcccggcaacaattaatagactggatggaggcgga
taaagttgcaggaccacttctgcgctcggcccttccggctggctggtttattgctgataaatctggagccggtgagcgtgggtctcgcg
gtatcattgcagcactggggccagatggtaagccctcccgtatcgtagttatctacacgacggggagtcaggcaactatggatgaacg
aaatagacagatcgctgagataggtgcctcactgattaagcattggtaactgtcagaccaagtttactcatatatactttagattgatttaaa
acttcatttttaatttaaaaggatctaggtgaagatcctttttgataatctcatgaccaaaatcccttaacgtgagttttcgttccactgagcgt
cagaccccgtagaaaagatcaaaggatcttcttgagatcctttttttctgcgcgtaatctgctgcttgcaaacaaaaaaaccaccgctacc
agcggtggtttgtttgccggatcaagagctaccaactctttttccgaaggtaactggcttcagcagagcgcagataccaaatactgttctt
ctagtgtagccgtagttaggccaccacttcaagaactctgtagcaccgcctacatacctcgctctgctaatcctgttaccagtggctgctg
ccagtggcgataagtcgtgtcttaccgggttggactcaagacgatagttaccggataaggcgcagcggtcgggctgaacggggggtt
cgtgcacacagcccagcttggagcgaacgacctacaccgaactgagatacctacagcgtgagctatgagaaagcgccacgcttccc
gaagggagaaaggcggacaggtatccggtaagcggcagggtcggaacaggagagcgcacgagggagcttccagggggaaacg
cctggtatctttatagtcctgtcgggtttcgccacctctgacttgagcgtcgatttttgtgatgctcgtcaggggggcggagcctatggaaa
aacgccagcaacgcggcctttttacggttcctggccttttgctggccttttgctcacatggctcgacagatct

[0276] In some embodiments therefore, the composition of the disclosure comprises a nucleic acid molecule comprising at least about 70%, 75%, 80%, 85%, 90%, 91%, 92%, 93%, 94%, 95%, 96%, 97%, 98% or 99% sequence identity to SEQ ID NO: 161, SEQ ID NO: 162, SEQ ID NO: 163, SEQ ID NO: 164, SEQ ID NO: 165, SEQ ID NO: 166, SEQ ID NO: 167 or SEQ ID NO: 168, or a functional fragment or variant thereof. In some embodiments, the composition of the disclosure comprises a nucleic acid molecule comprising the nucleotide sequence of SEQ ID NO: 161, SEQ ID NO: 162, SEQ ID NO: 163, SEQ ID NO: 164, SEQ ID NO: 165, SEQ ID NO: 166, SEQ ID NO: 167 or SEQ ID NO: 168, or a functional fragment or variant thereof. In some embodiments, the composition of the disclosure comprises a nucleic acid molecule that is a pVax variant.

[0277] In some embodiments, the composition of the disclosure comprises a nucleic acid molecule or a plasmid comprising at least about 70%, 75%, 80%, 85%, 90%, 91%, 92%, 93%, 94%, 95%, 96%, 97%, 98%, 99% or 100% sequence identity to SEQ ID NO: 161, SEQ ID NO: 162, SEQ ID NO: 163, SEQ ID NO: 164, SEQ ID NO: 165, SEQ ID NO: 166, SEQ ID NO: 167 or SEQ ID NO: 168, or a functional fragment or variant thereof, and an expressible nucleic acid sequence comprising a first nucleic acid sequence encoding a scaffold domain comprising any of the self-assembling polypeptides disclosed herein, or a functional fragment or variant thereof, and a second nucleic acid sequence encoding an antigen domain comprising any of the viral antigens disclosed herein, or a functional fragment or variant thereof. In some embodiments, the composition of the disclosure comprises a nucleic acid molecule or a plasmid comprising at least about 70%, 75%, 80%, 85%, 90%, 91%, 92%, 93%, 94%, 95%, 96%, 97%, 98%, 99% or 100% sequence identity to SEQ ID NO: 161, SEQ ID NO: 162, SEQ ID NO: 163, SEQ ID NO: 164, SEQ ID NO: 165, SEQ ID NO: 166, SEQ ID NO: 167 or SEQ ID NO: 168, or a functional fragment or variant thereof, and an expressible nucleic acid sequence comprising a first nucleic acid sequence encoding a scaffold domain comprising a self-assembling polypeptide comprising at least about 70%, 75%, 80%, 85%, 90%, 91%, 92%, 93%, 94%, 95%, 96%, 97%, 98%, 99% or 100% sequence identity to SEQ ID NO: 8, SEQ ID NO: 10, SEQ ID NO: 12, SEQ ID NO: 14, SEQ ID NO: 16, SEQ ID NO: 18 or SEQ ID NO: 20, or a functional fragment or variant thereof, and a second nucleic acid sequence encoding an antigen domain comprising a viral antigen comprising at least about 70%, 75%, 80%, 85%, 90%, 91%, 92%, 93%, 94%, 95%, 96%, 97%, 98%, 99% or 100% sequence identity to SEQ ID NO: 60, SEQ ID NO: 62, SEQ ID NO: 64, SEQ ID NO: 66, SEQ ID NO: 171, SEQ ID NO: 172, SEQ ID NO: 173, SEQ ID NO: 174, SEQ ID NO: 175, SEQ ID NO: 176 or SEQ ID NO: 177, or a functional fragment or variant thereof. In some embodiments, the composition of the disclosure comprises a nucleic acid molecule or a plasmid comprising at least about 70%, 75%, 80%, 85%, 90%, 91%, 92%, 93%, 94%, 95%, 96%, 97%, 98%, 99% or 100% sequence identity to SEQ ID NO: 161, SEQ ID NO: 162, SEQ ID NO: 163, SEQ ID NO: 164, SEQ ID NO: 165, SEQ ID NO: 166, SEQ ID NO: 167 or SEQ ID NO: 168, or a functional fragment or variant thereof, and an expressible nucleic acid sequence comprising a first nucleic acid sequence comprising at least about 70%, 75%, 80%, 85%, 90%, 91%, 92%, 93%, 94%, 95%, 96%, 97%, 98%, 99% or 100% sequence identity to SEQ ID NO: 7, SEQ ID NO: 9, SEQ ID NO: 11, SEQ ID NO: 13, SEQ ID NO: 15, SEQ ID NO: 17 or SEQ ID NO: 19, or a functional fragment or variant thereof, and a second nucleic acid sequence comprising at least about 70%, 75%, 80%, 85%, 90%, 91%, 92%, 93%, 94%, 95%, 96%, 97%, 98%, 99% or 100% sequence identity to SEQ ID NO: 59, SEQ ID NO: 61, SEQ ID NO: 63 or SEQ ID NO: 65, or a functional fragment or variant thereof. In some embodiments, such nucleic acid molecules or plasmids may further comprise a third nucleic acid sequence encoding a leader sequence comprising at least about 70%, 75%, 80%, 85%, 90%, 91%, 92%, 93%, 94%, 95%, 96%, 97%, 98%, 99% or 100% sequence identity to SEQ ID NO: 1 or SEQ ID NO: 5, or a functional fragment or variant thereof. In such embodiments, the third nucleic acid sequence encoding a leader sequence may comprising at least about 70%, 75%, 80%, 85%, 90%, 91%, 92%, 93%, 94%, 95%, 96%, 97%, 98%, 99% or 100% sequence identity to SEQ ID NO: 2, SEQ ID NO: 3, SEQ ID NO: 4 or SEQ ID NO: 6, or a functional fragment or variant thereof.

[0278] In some embodiments, the nucleic acid molecules or plasmids of the disclosure may additionally comprise another nucleic acid sequence encoding a linker comprising at least about 70%, 75%, 80%, 85%, 90%, 91%, 92%, 93%, 94%, 95%, 96%, 97%, 98%, 99% or 100% sequence identity to SEQ ID NO: 22, SEQ ID NO: 23, SEQ ID NO: 24, SEQ ID NO: 25, SEQ ID NO: 26, SEQ ID NO: 32, SEQ ID NO: 34, SEQ ID NO: 36, SEQ ID NO: 38, SEQ ID NO: 40, SEQ ID NO: 42, SEQ ID NO: 44, SEQ ID NO: 46, SEQ ID NO: 48, SEQ ID NO: 50, SEQ ID NO: 52, SEQ ID NO: 54, SEQ ID NO: 56 or SEQ ID NO: 58, or a functional fragment or variant thereof. In some embodiments, the nucleic acid sequence encoding a linker may comprising at least about 70%, 75%, 80%, 85%, 90%, 91%, 92%, 93%, 94%, 95%, 96%, 97%, 98%, 99% or 100% sequence identity to SEQ ID NO: 21, SEQ ID NO: 27, SEQ ID NO: 28, SEQ ID NO: 29, SEQ ID NO: 30, SEQ ID NO: 31, SEQ ID NO: 33, SEQ ID NO: 35, SEQ ID NO: 37, SEQ ID NO: 39, SEQ ID NO: 41, SEQ ID NO: 43, SEQ ID NO: 45, SEQ ID NO: 47, SEQ ID NO: 49, SEQ ID NO: 51, SEQ ID NO: 53, SEQ ID NO: 55 or SEQ ID NO: 57 or a functional fragment or variant thereof.

[0279] In some embodiments, the composition of the disclosure comprises a nucleic acid molecule or a plasmid comprising at least about 70%, 75%, 80%, 85%, 90%, 91%, 92%, 93%, 94%, 95%, 96%, 97%, 98%, 99% or 100% sequence identity to SEQ ID NO: 161, SEQ ID NO: 162, SEQ ID NO: 163, SEQ ID NO: 164, SEQ ID NO: 165, SEQ ID NO: 166, SEQ ID NO: 167 or SEQ ID NO: 168, or a functional fragment or variant thereof, and an expressible nucleic acid sequence comprising a first nucleic acid sequence encoding a leader sequence comprising any of the leader sequences disclosed herein, or a functional fragment or variant thereof, and a second nucleic acid sequence encoding a viral trimer (or three viral monomers) comprising any of the viral antigens disclosed herein, or a functional fragment or variant thereof. In some embodiments, the composition of the disclosure comprises a nucleic acid molecule or a plasmid comprising at least about 70%, 75%, 80%, 85%, 90%, 91%, 92%, 93%, 94%, 95%, 96%, 97%, 98%, 99% or 100% sequence identity to SEQ ID NO: 161, SEQ ID NO: 162, SEQ ID NO: 163, SEQ ID NO: 164, SEQ ID NO: 165, SEQ ID NO: 166, SEQ ID NO: 167 or SEQ ID NO: 168, or a functional fragment or variant thereof, and an expressible nucleic acid sequence comprising a first nucleic acid sequence encoding a leader sequence comprising at least about 70%, 75%, 80%, 85%, 90%, 91%, 92%, 93%, 94%, 95%, 96%, 97%, 98%, 99% or 100% sequence identity to SEQ ID NO: 1 or SEQ ID NO: 5, or a functional fragment or variant thereof, and a second nucleic acid sequence encoding three viral monomers, each viral monomer independently comprising at least about 70%, 75%, 80%, 85%, 90%, 91%, 92%, 93%, 94%, 95%, 96%, 97%, 98%, 99% or 100% sequence identity to SEQ ID NO: 60, SEQ ID NO: 62, SEQ ID NO: 64, SEQ ID NO: 66, SEQ ID NO: 171, SEQ ID NO: 172, SEQ ID NO: 173, SEQ ID NO: 174, SEQ ID NO: 175, SEQ ID NO: 176 or SEQ ID NO: 177, or a functional fragment or variant thereof. In some embodiments, the composition of the disclosure comprises a nucleic acid molecule or a plasmid comprising at least about 70%, 75%, 80%, 85%, 90%, 91%, 92%, 93%, 94%, 95%, 96%, 97%, 98%, 99% or 100% sequence identity to SEQ ID NO: 161, SEQ ID NO: 162, SEQ ID NO: 163, SEQ ID NO: 164, SEQ ID NO: 165, SEQ ID NO: 166, SEQ ID NO: 167 or SEQ ID NO: 168, or a functional fragment or variant thereof, and an expressible nucleic acid sequence comprising a first nucleic acid sequence comprising at least about 70%, 75%, 80%, 85%, 90%, 91%, 92%, 93%, 94%, 95%, 96%, 97%, 98%, 99% or 100% sequence identity to SEQ ID NO: 2, SEQ ID NO: 3, SEQ ID NO: 4 or SEQ ID NO: 6, or a functional fragment or variant thereof, and a second nucleic acid sequence encoding three viral monomers, each viral monomer independently being encoded by a nucleic acid sequence comprising at least about 70%, 75%, 80%, 85%, 90%, 91%, 92%, 93%, 94%, 95%, 96%, 97%, 98%, 99% or 100% sequence identity to SEQ ID NO: 59, SEQ ID NO: 61, SEQ ID NO: 63 or SEQ ID NO: 65, or a functional fragment or variant thereof. In some embodiments, each of the viral monomers is linked by one or more linker peptides comprising at least about 70%, 75%, 80%, 85%, 90%, 91%, 92%, 93%, 94%, 95%, 96%, 97%, 98%, 99% or 100% sequence identity to SEQ ID NO: 22, SEQ ID NO: 23, SEQ ID NO: 24, SEQ ID NO: 25, SEQ ID NO: 26, SEQ ID NO: 32, SEQ ID NO: 34, SEQ ID NO: 36, SEQ ID NO: 38, SEQ ID NO: 40, SEQ ID NO: 42, SEQ ID NO: 44, SEQ ID NO: 46, SEQ ID NO: 48, SEQ ID NO: 50, SEQ ID NO: 52, SEQ ID NO: 54, SEQ ID NO: 56 or SEQ ID NO: 58, or a functional fragment or variant thereof. In some embodiments, each of the viral monomers is linked by one or more linker peptides encoded by a nucleic acid sequence comprising at least about 70%, 75%, 80%, 85%, 90%, 91%, 92%, 93%, 94%, 95%, 96%, 97%, 98%, 99% or 100% sequence identity to SEQ ID NO: 21, SEQ ID NO: 27, SEQ ID NO: 28, SEQ ID NO: 29, SEQ ID NO: 30, SEQ ID NO: 31, SEQ ID NO: 33, SEQ ID NO: 35, SEQ ID NO: 37, SEQ ID NO: 39, SEQ ID NO: 41, SEQ ID NO: 43, SEQ ID NO: 45, SEQ ID NO: 47, SEQ ID NO: 49, SEQ ID NO: 51, SEQ ID NO: 53, SEQ ID NO: 55 or SEQ ID NO: 57 or a functional fragment or variant thereof.

[0280] In some embodiments, any of the nucleic acid molecules or plasmids of the disclosure additionally comprises a nucleic acid sequence encoding a furin cleavage site comprising at least about 60%, 65%, 70%, 75%, 80%, 85%, 90%, 95%, 99% or 100% sequence identity to SEQ ID NO: 67, or a functional fragment or variant thereof.

[0281] In some embodiments, the nucleic acid molecule or plasmid may further comprises a nucleic acid encoding a transmembrane domain and a foldon domain. A non-limiting example of the transmembrane domain is the transmembrane domain of a platelet derived growth factor receptor comprising the sequence of AVGQDTQEVIVVPHSLPFKVVVISAILALVVLTIISLIILIMLWQKKPR (SEQ ID NO: 169). A non-limiting example of the foldon domain may comprise the sequence of YIPEAPRDGQAYVRKDGEWVLLSTFL (SEQ ID NO: 170). Thus, in some embodiments, the composition of the disclosure comprises a nucleic acid molecule or a plasmid comprising a nucleic acid sequence encoding a transmembrane domain comprising at least about 70%, 75%, 80%, 85%, 90%, 95%, 96%, 97%, 98% 99% or 100% sequence identity to SEQ ID NO: 169, or a functional fragment or variant thereof. In some embodiments, the composition of the disclosure comprises a nucleic acid molecule or a plasmid comprising a nucleic acid sequence encoding a foldon domain comprising at least about 70%, 75%, 80%, 85%, 90%, 95%, 96%, 97%, 98% 99% or 100% sequence identity to SEQ ID NO: 170, or a functional fragment or variant thereof.

[0282] In some embodiments, the composition of the disclosure comprises a nucleic acid molecule or a plasmid comprising at least about 70%, 75%, 80%, 85%, 90%, 91%, 92%, 93%, 94%, 95%, 96%, 97%, 98%, 99% or 100% sequence identity to SEQ ID NO: 161, SEQ ID NO: 162, SEQ ID NO: 163, SEQ ID NO: 164, SEQ ID NO: 165, SEQ ID NO: 166, SEQ ID NO: 167 or SEQ ID NO: 168, or a functional fragment or variant thereof, and an expressible nucleic acid sequence comprising at least about 70%, 75%, 80%, 85%, 90%, 91%, 92%, 93%, 94%, 95%, 96%, 97%, 98%, 99% or 100% sequence identity to SEQ ID NO: 68, SEQ ID NO: 69, SEQ ID NO: 71, SEQ ID NO: 72, SEQ ID NO: 74, SEQ ID NO: 75, SEQ ID NO: 77, SEQ ID NO: 78, SEQ ID NO: 80, SEQ ID NO: 81, SEQ ID NO: 83, SEQ ID NO: 84, SEQ ID NO: 86, SEQ ID NO: 87, SEQ ID NO: 89, SEQ ID NO: 90, SEQ ID NO: 92, SEQ ID NO: 93, SEQ ID NO: 95, SEQ ID NO: 96, SEQ ID NO: 98, SEQ ID NO: 99, SEQ ID NO: 101, SEQ ID NO: 102, SEQ ID NO: 104, SEQ ID NO: 105, SEQ ID NO: 107, SEQ ID NO: 108, SEQ ID NO: 110, SEQ ID NO: 111, SEQ ID NO: 113, SEQ ID NO: 114, SEQ ID NO: 116, SEQ ID NO: 117, SEQ ID NO: 119, SEQ ID NO: 120, SEQ ID NO: 122, SEQ ID NO: 123, SEQ ID NO: 125, SEQ ID NO: 126, SEQ ID NO: 128, SEQ ID NO: 129, SEQ ID NO: 131, SEQ ID NO: 132, SEQ ID NO: 134, SEQ ID NO: 135, SEQ ID NO: 137, SEQ ID NO: 138, SEQ ID NO: 140, SEQ ID NO: 141, SEQ ID NO: 143, SEQ ID NO: 144, SEQ ID NO: 146, SEQ ID NO: 147, SEQ ID NO: 149, SEQ ID NO: 150, SEQ ID NO: 152, SEQ ID NO: 153, SEQ ID NO: 155, SEQ ID NO: 156, SEQ ID NO: 158 or SEQ ID NO: 159, or a functional fragment or variant thereof. In some embodiments, the composition of the disclosure comprises a nucleic acid molecule or a plasmid comprising the nucleotide sequence of SEQ ID NO: 161, SEQ ID NO: 162, SEQ ID NO: 163, SEQ ID NO: 164, SEQ ID NO: 165, SEQ ID NO: 166, SEQ ID NO: 167 or SEQ ID NO: 168, or a functional fragment or variant thereof, and an expressible nucleic acid sequence comprising the nucleotide sequence of SEQ ID NO: 68, SEQ ID NO: 69, SEQ ID NO: 71, SEQ ID NO: 72, SEQ ID NO: 74, SEQ ID NO: 75, SEQ ID NO: 77, SEQ ID NO: 78, SEQ ID NO: 80, SEQ ID NO: 81, SEQ ID NO: 83, SEQ ID NO: 84, SEQ ID NO: 86, SEQ ID NO: 87, SEQ ID NO: 89, SEQ ID NO: 90, SEQ ID NO: 92, SEQ ID NO: 93, SEQ ID NO: 95, SEQ ID NO: 96, SEQ ID NO: 98, SEQ ID NO: 99, SEQ ID NO: 101, SEQ ID NO: 102, SEQ ID NO: 104, SEQ ID NO: 105, SEQ ID NO: 107, SEQ ID NO: 108, SEQ ID NO: 110, SEQ ID NO: 111, SEQ ID NO: 113, SEQ ID NO: 114, SEQ ID NO: 116, SEQ ID NO: 117, SEQ ID NO: 119, SEQ ID NO: 120, SEQ ID NO: 122, SEQ ID NO: 123, SEQ ID NO: 125, SEQ ID NO: 126, SEQ ID NO: 128, SEQ ID NO: 129, SEQ ID NO: 131, SEQ ID NO: 132, SEQ ID NO: 134, SEQ ID NO: 135, SEQ ID NO: 137, SEQ ID NO: 138, SEQ ID NO: 140, SEQ ID NO: 141, SEQ ID NO: 143, SEQ ID NO: 144, SEQ ID NO: 146, SEQ ID NO: 147, SEQ ID NO: 149, SEQ ID NO: 150, SEQ ID NO: 152, SEQ ID NO: 153, SEQ ID NO: 155, SEQ ID NO: 156, SEQ ID NO: 158 or SEQ ID NO: 159, or a functional fragment or variant thereof. In some embodiments, the composition of the disclosure comprises a nucleic acid molecule or a plasmid comprising at least about 70%, 75%, 80%, 85%, 90%, 91%, 92%, 93%, 94%, 95%, 96%, 97%, 98%, 99% or 100% sequence identity to SEQ ID NO: 161, SEQ ID NO: 162, SEQ ID NO: 163, SEQ ID NO: 164, SEQ ID NO: 165, SEQ ID NO: 166, SEQ ID NO: 167 or SEQ ID NO: 168, or a functional fragment or variant thereof, and an expressible nucleic acid sequence encoding a polypeptide comprising at least about 70%, 75%, 80%, 85%, 90%, 91%, 92%, 93%, 94%, 95%, 96%, 97%, 98%, 99% or 100% sequence identity to SEQ ID NO: 70, SEQ ID NO: 73, SEQ ID NO: 76, SEQ ID NO: 79, SEQ ID NO: 82, SEQ ID NO: 85, SEQ ID NO: 88, SEQ ID NO: 91, SEQ ID NO: 94, SEQ ID NO: 97, SEQ ID NO: 100, SEQ ID NO: 103, SEQ ID NO: 106, SEQ ID NO: 109, SEQ ID NO: 112, SEQ ID NO: 115, SEQ ID NO: 118, SEQ ID NO: 121, SEQ ID NO: 124, SEQ ID NO: 127, SEQ ID NO: 130, SEQ ID NO: 133, SEQ ID NO: 136, SEQ ID NO: 139, SEQ ID NO: 142, SEQ ID NO: 145, SEQ ID NO: 148, SEQ ID NO: 151, SEQ ID NO: 154, SEQ ID NO: 157 or SEQ ID NO: 160, or a functional fragment or variant thereof. In some embodiments, the composition of the disclosure comprises a nucleic acid molecule or a plasmid comprising the nucleotide sequence of SEQ ID NO: 161, SEQ ID NO: 162, SEQ ID NO: 163, SEQ ID NO: 164, SEQ ID NO: 165, SEQ ID NO: 166, SEQ ID NO: 167 or SEQ ID NO: 168, or a functional fragment or variant thereof, and an expressible nucleic acid sequence encoding a polypeptide comprising the amino acid sequence of SEQ ID NO: 70, SEQ ID NO: 73, SEQ ID NO: 76, SEQ ID NO: 79, SEQ ID NO: 82, SEQ ID NO: 85, SEQ ID NO: 88, SEQ ID NO: 91, SEQ ID NO: 94, SEQ ID NO: 97, SEQ ID NO: 100, SEQ ID NO: 103, SEQ ID NO: 106, SEQ ID NO: 109, SEQ ID NO: 112, SEQ ID NO: 115, SEQ ID NO: 118, SEQ ID NO: 121, SEQ ID NO: 124, SEQ ID NO: 127, SEQ ID NO: 130, SEQ ID NO: 133, SEQ ID NO: 136, SEQ ID NO: 139, SEQ ID NO: 142, SEQ ID NO: 145, SEQ ID NO: 148, SEQ ID NO: 151, SEQ ID NO: 154, SEQ ID NO: 157 or SEQ ID NO: 160, or a functional fragment or variant thereof.

[0283] In some embodiments, the disclosure relates to a vector or a plasmid comprising one or a plurality of regulatory sequences operably linked to one or more of any of the disclosed expressible nucleic acid sequences. In some embodiments, the disclosure relates to a composition comprising a nucleic acid molecule comprising at least about 70%, 75%, 80%, 85%, 90%, 91%, 92%, 93%, 94%, 95%, 96%, 97%, 99% or 100% sequence identity to SEQ ID NO: 161, or a functional fragment or variant thereof, and positioned within the multiple cloning site thereof is one or more expressible nucleic acid sequences according to the present disclosure. In some embodiments, the disclosure relates to a composition comprising one or a plurality of RNA molecules, each individually comprising the RNA sequences disclosed herein, including but not limited to SEQ ID NO: 69, SEQ ID NO: 72, SEQ ID NO: 75, SEQ ID NO: 78, SEQ ID NO: 81, SEQ ID NO: 84, SEQ ID NO: 87, SEQ ID NO: 90, SEQ ID NO: 93, SEQ ID NO: 96, SEQ ID NO: 99, SEQ ID NO: 102, SEQ ID NO: 105, SEQ ID NO: 108, SEQ ID NO: 111, SEQ ID NO: 114, SEQ ID NO: 117, SEQ ID NO: 120, SEQ ID NO: 123, SEQ ID NO: 126, SEQ ID NO: 129, SEQ ID NO: 132, SEQ ID NO: 135, SEQ ID NO: 138, SEQ ID NO: 141, SEQ ID NO: 144, SEQ ID NO: 147, SEQ ID NO: 150, SEQ ID NO: 153, SEQ ID NO: 156 or SEQ ID NO: 159, or a functional fragment or variant thereof.

### C. Polypeptide Sequences

[0284] Disclosed are the polypeptide sequences encoded by the disclosed nucleic acid sequences. In some embodiments, the disclosure relates to compositions comprising polypeptide sequences encoded by the expressible nucleic acid molecules of the present disclosure comprising a scaffold domain comprising a self-assembling polypeptide and an antigen domain comprising a viral antigen, and optionally comprising a leader domain comprising a leader sequence and/or a linker domain comprising a linker peptide. In some embodiments, the disclosure relates to compositions comprising polypeptide sequences encoded by the expressible nucleic acid molecules of the present disclosure comprising a leader domain comprising a leader sequence and an antigen domain comprising three viral monomers (trimer), and optionally comprising one or plurality of linker domains each comprising a linker peptide. The disclosure also relates to cells expressing one or more such polypeptides disclosed herein.

[0285] In some embodiments, the polypeptide encoded by the expressible nucleic acid molecule of the present disclosure comprises at least about 70%, 75%, 80%, 85%, 90%, 91%, 92%, 93%, 94%, 95%, 96%, 97%, 98%, 99% or 100% sequence identity to SEQ ID NO: 70, SEQ ID NO: 73, SEQ ID NO: 76, SEQ ID NO: 79, SEQ ID NO: 82, SEQ ID NO: 85, SEQ ID NO: 88, SEQ ID NO: 91, SEQ ID NO: 94, SEQ ID NO: 97, SEQ ID NO: 100, SEQ ID NO: 103, SEQ ID NO: 106, SEQ ID NO: 109, SEQ ID NO: 112, SEQ ID NO: 115, SEQ ID NO: 118, SEQ ID NO: 121, SEQ ID NO: 124, SEQ ID NO: 127, SEQ ID NO: 130, SEQ ID NO: 133, SEQ ID NO: 136, SEQ ID NO: 139, SEQ ID NO: 142, SEQ ID NO: 145, SEQ ID NO: 148, SEQ ID NO: 151, SEQ ID NO: 154, SEQ ID NO: 157 or SEQ ID NO: 160, or a functional fragment or variant thereof. In some embodiments, the polypeptide is encoded by a nucleic acid sequence comprises at least about 70%, 75%, 80%, 85%, 90%, 91%, 92%, 93%, 94%, 95%, 96%, 97%, 98%, 99% or 100% sequence identity to SEQ ID NO: 68, SEQ ID NO: 69, SEQ ID NO: 71, SEQ ID NO: 72, SEQ ID NO: 74, SEQ ID NO: 75, SEQ ID NO: 77, SEQ ID NO: 78, SEQ ID NO: 80, SEQ ID NO: 81, SEQ ID NO: 83, SEQ ID NO: 84, SEQ ID NO: 86, SEQ ID NO: 87, SEQ ID NO: 89, SEQ ID NO: 90, SEQ ID NO: 92, SEQ ID NO: 93, SEQ ID NO: 95, SEQ ID NO: 96, SEQ ID NO: 98, SEQ ID NO: 99, SEQ ID NO: 101, SEQ ID NO: 102, SEQ ID NO: 104, SEQ ID NO: 105, SEQ ID NO: 107, SEQ ID NO: 108, SEQ ID NO: 110, SEQ ID NO: 111, SEQ ID NO: 113, SEQ ID NO: 114, SEQ ID NO: 116, SEQ ID NO: 117, SEQ ID NO: 119, SEQ ID NO: 120, SEQ ID NO: 122, SEQ ID NO: 123, SEQ ID NO: 125, SEQ ID NO: 126, SEQ ID NO: 128, SEQ ID NO: 129, SEQ ID NO: 131, SEQ ID NO: 132, SEQ ID NO: 134, SEQ ID NO: 135, SEQ ID NO: 137, SEQ ID NO: 138, SEQ ID NO: 140, SEQ ID NO: 141, SEQ ID NO: 143, SEQ ID NO: 144, SEQ ID NO: 146, SEQ ID NO: 147, SEQ ID NO: 149, SEQ ID NO: 150, SEQ ID NO: 152, SEQ ID NO: 153, SEQ ID NO: 155, SEQ ID NO: 156, SEQ ID NO: 158 or SEQ ID NO: 159, or a functional fragment or variant thereof.

[0286] In some embodiments, the leader sequence encoded by the expressible nucleic acid sequence of the disclosure comprises at least about 70%, 75%, 80%, 85%, 90%, 91%, 92%, 93%, 94%, 95%, 96%, 97%, 98%, 99% or 100% sequence identity to SEQ ID NO: 1 or SEQ ID NO: 5, or a functional fragment or variant thereof. In some embodiments, the leader sequence is encoded by a nucleic acid sequence comprises at least about 70%, 75%, 80%, 85%, 90%, 91%, 92%, 93%, 94%, 95%, 96%, 97%, 98%, 99% or 100% sequence identity to SEQ ID NO: 2, SEQ ID NO: 3, SEQ ID NO: 4 or SEQ ID NO: 6, or a functional fragment or variant thereof.

[0287] In some embodiments, the self-assembling polypeptide encoded by the expressible nucleic acid sequence of the disclosure comprises at least about 70%, 75%, 80%, 85%, 90%, 91%, 92%, 93%, 94%, 95%, 96%, 97%, 98%, 99% or 100% sequence identity to SEQ ID NO: 8, SEQ ID NO: 10, SEQ ID NO: 12, SEQ ID NO: 14, SEQ ID NO: 16, SEQ ID NO: 18 or SEQ ID NO: 20, or a functional fragment or variant thereof. In some embodiments, the self-assembling polypeptide is encoded by a nucleic acid sequence comprises at least about 70%, 75%, 80%, 85%, 90%, 91%, 92%, 93%, 94%, 95%, 96%, 97%, 98%, 99% or 100% sequence identity to SEQ ID NO: 7, SEQ ID NO: 9, SEQ ID NO: 11, SEQ ID NO: 13, SEQ ID NO: 15, SEQ ID NO: 17 or SEQ ID NO: 19, or a functional fragment or variant thereof.

[0288] In some embodiments, the linker peptide encoded by the expressible nucleic acid sequence of the disclosure comprises at least about 70%, 75%, 80%, 85%, 90%, 91%, 92%, 93%, 94%, 95%, 96%, 97%, 98%, 99% or 100% sequence identity to SEQ ID NO: 22, SEQ ID NO: 23, SEQ ID NO: 24, SEQ ID NO: 25, SEQ ID NO: 26, SEQ ID NO: 32, SEQ ID NO: 34, SEQ ID NO: 36, SEQ ID NO: 38, SEQ ID NO: 40, SEQ ID NO: 42, SEQ ID NO: 44, SEQ ID NO: 46, SEQ ID NO: 48, SEQ ID NO: 50, SEQ ID NO: 52, SEQ ID NO: 54, SEQ ID NO: 56 or SEQ ID NO: 58, or a functional fragment or variant thereof. In some embodiments, the linker peptide is encoded by a nucleic acid sequence comprises at least about 70%, 75%, 80%, 85%, 90%, 91%, 92%, 93%, 94%, 95%, 96%, 97%, 98%, 99% or 100% sequence identity to SEQ ID NO: 21, SEQ ID NO: 27, SEQ ID NO: 28, SEQ ID NO: 29, SEQ ID NO: 30, SEQ ID NO: 31, SEQ ID NO: 33, SEQ ID NO: 35, SEQ ID NO: 37, SEQ ID NO: 39, SEQ ID NO: 41, SEQ ID NO: 43, SEQ ID NO: 45, SEQ ID NO: 47, SEQ ID NO: 49, SEQ ID NO: 51, SEQ ID NO: 53, SEQ ID NO: 55 or SEQ ID NO: 57 or a functional fragment or variant thereof.

[0289] In some embodiments, the viral antigen or monomer encoded by the expressible nucleic acid sequence of the disclosure comprises at least about 70%, 75%, 80%, 85%, 90%, 91%, 92%, 93%, 94%, 95%, 96%, 97%, 98%, 99% or 100% sequence identity to SEQ ID NO: 60, SEQ ID NO: 62, SEQ ID NO: 64, SEQ ID NO: 66, SEQ ID NO: 171, SEQ ID NO: 172, SEQ ID NO: 173, SEQ ID NO: 174, SEQ ID NO: 175, SEQ ID NO: 176 or SEQ ID NO: 177, or a functional fragment or variant thereof. In some embodiments, the viral antigen or monomer is encoded by a nucleic acid sequence comprises at least about 70%, 75%, 80%, 85%, 90%, 91%, 92%, 93%, 94%, 95%, 96%, 97%, 98%, 99% or 100% sequence identity to SEQ ID NO: 59, SEQ ID NO: 61, SEQ ID NO: 63 or SEQ ID NO: 65, or a functional fragment or variant thereof.

[0290] In some embodiments, the polypeptides encoded by the expressible nucleic acid molecule of the present disclosure comprises a furin cleavage site comprising at least about 70%, 75%, 80%, 85%, 90%, 91%, 92%, 93%, 94%, 95%, 96%, 97%, 98%, 99% or 100% sequence identity to SEQ ID NO: 67. In some embodiments, the polypeptides encoded by the expressible nucleic acid molecule of the present disclosure comprises a transmembrane domain comprising at least about 70%, 75%, 80%, 85%, 90%, 91%, 92%, 93%, 94%, 95%, 96%, 97%, 98%, 99% or 100% sequence identity to SEQ ID NO: 169. In some embodiments, the polypeptides encoded by the expressible nucleic acid molecule of the present disclosure comprises a foldon domain comprising at least about 70%, 75%, 80%, 85%, 90%, 91%, 92%, 93%, 94%, 95%, 96%, 97%, 98%, 99% or 100% sequence identity to SEQ ID NO: 170.

### D. Pharmaceutical Compositions

[0291] Disclosed are pharmaceutical compositions comprising any one or more of the disclosed compositions and a pharmaceutically acceptable carrier. In some embodiments the pharmaceutical composition comprising a therapeutically effective amount of a nucleic acid sequence that encodes LS-3 or a variant comprising at least 70% sequence identity to the LS-3 sequence.

[0292] In some embodiments, any of the disclosed compositions is from about 1 to about 30 micrograms of the disclosed DNA and/or RNA vaccine. For example, any of the disclosed compositions can be from about 1 to about 5 micrograms the disclosed DNA and/or RNA vaccine. In some preferred embodiments, the pharmaceutical compositions contain from about 5 nanograms to about 800 micrograms of the disclosed DNA and/or RNA vaccine. In some preferred embodiments, the pharmaceutical compositions contain about 25 to about 250 micrograms, from about 100 to about 200 micrograms, from about 1 nanogram to 100 milligrams; from about 1 microgram to about 10 milligrams; from about 0.1 microgram to about 10 milligrams; from about 1 milligram to about 2 milligrams, from about 5 nanograms to about 1000 micrograms, from about 10 nanograms to about 800 micrograms, from about 0.1 to about 500 micrograms, from about 1 to about 350 micrograms, from about 25 to about 250 micrograms, from about 100 to about 200 micrograms of the DNA and/or RNA vaccine or plasmid thereof. The pharmaceutical compositions can comprise from about 5 nanograms to about 10 mg of the disclosed DNA and/or RNA vaccine. In some embodiments, pharmaceutical compositions according to the present invention comprise from about 25 nanograms to about 5 mg of the disclosed DNA and/or RNA vaccine. In some embodiments, the pharmaceutical compositions contain from about 50 nanograms to about 1 mg of the disclosed DNA and/or RNA vaccine. In some embodiments, the pharmaceutical compositions contain about from about 0.1 to about 500 micrograms of the disclosed DNA and/or RNA vaccine. In some embodiments, the pharmaceutical compositions contain from about 1 to about 350 micrograms of the disclosed DNA and/or RNA vaccine. In some embodiments, the pharmaceutical compositions contain from about 5 to about 250 micrograms of the disclosed DNA and/or RNA vaccine. In some embodiments, the pharmaceutical compositions contain from about 10 to about 200 micrograms of the disclosed DNA and/or RNA vaccine. In some embodiments, the pharmaceutical compositions contain from about 15 to about 150 micrograms of the disclosed DNA and/or RNA vaccine. In some embodiments, the pharmaceutical compositions contain about 20 to about 100 micrograms of the disclosed DNA and/or RNA vaccine. In some embodiments, the pharmaceutical compositions contain about 25 to about 75 micrograms of the disclosed DNA and/or RNA vaccine. In some embodiments, the pharmaceutical compositions contain about 30 to about 50 micrograms of the disclosed DNA and/or RNA vaccine. In some embodiments, the pharmaceutical compositions contain about 35 to about 40 micrograms of the disclosed DNA and/or RNA vaccine. In some embodiments, the pharmaceutical compositions contain about 100 to about 200 micrograms the disclosed DNA and/or RNA vaccine. In some embodiments, the pharmaceutical compositions comprise about 10 micrograms to about 100 micrograms of the disclosed DNA and/or RNA vaccine. In some embodiments, the pharmaceutical compositions comprise about 20 micrograms to about 80 micrograms of the disclosed DNA and/or RNA vaccine. In some embodiments, the pharmaceutical compositions comprise about 25 micrograms to about 60 micrograms of the disclosed DNA and/or RNA vaccine. In some embodiments, the pharmaceutical compositions comprise about 30 nanograms to about 50 micrograms of the disclosed DNA and/or RNA vaccine. In some embodiments, the pharmaceutical compositions comprise about 35 nanograms to about 45 micrograms of the disclosed DNA and/or RNA vaccine. In some preferred embodiments, the pharmaceutical compositions contain about 0.1 to about 500 micrograms of the disclosed DNA and/or RNA vaccine. In some preferred embodiments, the pharmaceutical compositions contain about 1 to about 350 micrograms of the disclosed DNA and/or RNA vaccine. In some preferred embodiments, the pharmaceutical compositions contain about 1 to about 250 micrograms of the disclosed DNA and/or RNA vaccine. In some preferred embodiments, the pharmaceutical compositions contain about 2 to about 200 micrograms the disclosed DNA and/or RNA vaccine.

[0293] In some embodiments, pharmaceutical compositions according to the present invention comprise at least about 10, 15, 20, 25, 30, 35, 40, 45, 50, 55, 60, 65, 70, 75, 80, 85, 90, 95 or 100 nanograms of the disclosed DNA and/or RNA vaccine. In some embodiments, the pharmaceutical compositions can comprise at least about 1, 5, 10, 15, 20, 25, 30, 35, 40, 45, 50, 55, 60, 65, 70, 75, 80, 85, 90, 95, 100, 105, 110, 115, 120, 125, 130, 135, 140, 145, 150, 155, 160, 165, 170, 175, 180, 185, 190, 195, 200, 205, 210, 215, 220, 225, 230, 235, 240, 245, 250, 255, 260, 265, 270, 275, 280, 285, 290, 295, 300, 305, 310, 315, 320, 325, 330, 335, 340, 345, 350, 355, 360, 365, 370, 375, 380, 385, 390, 395, 400, 405, 410, 415, 420, 425, 430, 435, 440, 445, 450, 455, 460, 465, 470, 475, 480, 485, 490, 495, 500, 605, 610, 615, 620, 625, 630, 635, 640, 645, 650, 655, 660, 665, 670, 675, 680, 685, 690, 695, 700, 705, 710, 715, 720, 725, 730, 735, 740, 745, 750, 755, 760, 765, 770, 775, 780, 785, 790, 795, 800, 805, 810, 815, 820, 825, 830, 835, 840, 845, 850, 855, 860, 865, 870, 875, 880, 885, 890, 895. 900, 905, 910, 915, 920, 925, 930, 935, 940, 945, 950, 955, 960, 965, 970, 975, 980, 985, 990, 995 or 1000 micrograms of the disclosed DNA and/or RNA vaccine. In some embodiments, the pharmaceutical composition can comprise at least 1.5, 2, 2.5, 3, 3.5, 4, 4.5, 5, 5.5, 6, 6.5, 7, 7.5, 8, 8.5, 9, 9.5 or 10 mg or more of the disclosed DNA and/or RNA vaccine.

[0294] In other embodiments, the pharmaceutical composition can comprise up to and including about 10, 15, 20, 25, 30, 35, 40, 45, 50, 55, 60, 65, 70, 75, 80, 85, 90, 95 or 100 nanograms of the disclosed DNA and/or RNA vaccine. In some embodiments, the pharmaceutical composition can comprise up to and including about 1, 2, 3, 4, 5, 6, 7, 8, 9, 10, 15, 20, 25, 30, 35, 40, 45, 50, 55, 60, 65, 70, 75, 80, 85, 90, 95, 100, 105, 110, 115, 120, 125, 130, 135, 140, 145, 150, 155, 160, 165, 170, 175, 180, 185, 190, 195, 200, 205, 210, 215, 220, 225, 230, 235, 240, 245, 250, 255, 260, 265, 270, 275, 280, 285, 290, 295, 300, 305, 310, 315, 320, 325, 330, 335, 340, 345, 350, 355, 360, 365, 370, 375, 380, 385, 390, 395, 400, 405, 410, 415, 420, 425, 430, 435, 440, 445, 450, 455, 460, 465, 470, 475, 480, 485, 490, 495, 500, 605, 610, 615, 620, 625, 630, 635, 640, 645, 650, 655, 660, 665, 670, 675, 680, 685, 690, 695, 700, 705, 710, 715, 720, 725, 730, 735, 740, 745, 750, 755, 760, 765, 770, 775, 780, 785, 790, 795, 800, 805, 810, 815, 820, 825, 830, 835, 840, 845, 850, 855, 860, 865, 870, 875, 880, 885, 890, 895. 900, 905, 910, 915, 920, 925, 930, 935, 940, 945, 950, 955, 960, 965, 970, 975, 980, 985, 990, 995, or 1000 micrograms of the disclosed DNA and/or RNA vaccine. In some embodiments, the pharmaceutical composition can comprise up to and including about 1.5, 2, 2.5, 3, 3.5, 4, 4.5, 5, 5.5, 6, 6.5, 7, 7.5, 8, 8.5, 9, 9.5 or about 10 mg of the disclosed DNA and/or RNA vaccine. The pharmaceutical composition can further comprise other agents for formulation purposes according to the mode of administration to be used. In cases where pharmaceutical compositions are injectable pharmaceutical compositions, they are sterile, pyrogen free and particulate free. An isotonic formulation is preferably used. Generally, additives for isotonicity can include sodium chloride, dextrose, mannitol, sorbitol and lactose. In some cases, isotonic solutions such as phosphate buffered saline are preferred. Stabilizers include gelatin and albumin. In some embodiments, a vasoconstriction agent is added to the formulation.

[0295] The vaccine can further comprise a pharmaceutically acceptable excipient. The pharmaceutically acceptable excipient can be functional molecules as vehicles, adjuvants, carriers, or diluents. The pharmaceutically acceptable excipient can be a transfection facilitating agent, which can include surface active agents, such as immune-stimulating complexes (ISCOMS), Freunds incomplete adjuvant, LPS analog including monophosphoryl lipid A, muramyl peptides, quinone analogs, vesicles such as squalene and squalene, hyaluronic acid, lipids, liposomes, calcium ions, viral proteins, polyanions, polycations, or other known transfection facilitating agents. In some embodiments, the vaccine is a composition comprising a plasmid DNA molecule, RNA molecule or DNA/RNA hybrid molecule encoding an expressible nucleic acid sequence, the expressible nucleic acid sequence comprising a first nucleic acid encoding a self-assembling nanoparticle comprising a viral antigen, optionally encoding a leader sequence disclosed herein.

[0296] The transfection facilitating agent is a polyanion, polycation, including poly-L-glutamate (LGS), or lipid. The transfection facilitating agent is poly-L-glutamate, and more preferably, the poly-L-glutamate is present in the vaccine at a concentration less than 6 mg/ml. The transfection facilitating agent can also include surface active agents such as immune-stimulating complexes (ISCOMS), Freunds incomplete adjuvant, LPS analog including monophosphoryl lipid A, muramyl peptides, quinone analogs and vesicles such as squalene and squalene, and hyaluronic acid can also be used administered in conjunction with the genetic construct. In some embodiments, the DNA vector vaccines can also include a transfection facilitating agent such as lipids, liposomes, including lecithin liposomes or other liposomes known in the art, as a DNA-liposome mixture (see for example WO9324640), calcium ions, viral proteins, polyanions, polycations, or nanoparticles, or other known transfection facilitating agents. Preferably, the transfection facilitating agent is a polyanion, polycation, including poly-L-glutamate (LGS), or lipid. Concentration of the transfection agent in the vaccine is less than 4 mg/ml, less than 2 mg/ml, less than 1 mg/ml, less than 0.750 mg/ml, less than 0.500 mg/ml, less than 0.250 mg/ml, less than 0.100 mg/ml, less than 0.050 mg/ml, or less than 0.010 mg/ml.

[0297] The pharmaceutically acceptable excipient can be an adjuvant. The adjuvant can be other genes that are expressed in alternative plasmid or are deneurological system as proteins in combination with the plasmid above in the vaccine. The adjuvant can be selected from the group consisting of: α-interferon(IFN-α), β-interferon (IFN-β), γ-interferon, platelet derived growth factor (PDGF), TNFα, TNFβ, GM-CSF, epidermal growth factor (EGF), cutaneous T cell-attracting chemokine (CTACK), epithelial thymus-expressed chemokine (TECK), mucosae-associated epithelial chemokine (MEC), IL-12, IL-15, MHC, CD80,CD86 including IL-15 having the signal sequence deleted and optionally including the signal peptide from IgE. The adjuvant can be IL-12, IL-15, IL-28, CTACK, TECK, platelet derived growth factor (PDGF), TNFα, TNFβ, GM-CSF, epidermal growth factor (EGF), IL-1, IL-2, IL-4, IL-5, IL-6, IL-10, IL-12, IL-18, or a combination thereof. In an exemplary embodiment, the adjuvant is IL-12.

[0298] Other genes which can be useful adjuvants include those encoding: MCP-1, MIP-1a, MIP-1p, IL-8, RANTES, L-selectin, P-selectin, E-selectin, CD34, GlyCAM-1, MadCAM-1, LFA-1, VLA-1, Mac-1, p150.95, PECAM, ICAM-1, ICAM-2, ICAM-3, CD2, LFA-3, M-CSF, G-CSF, IL-4, mutant forms of IL-18, CD40, CD40L, vascular growth factor, fibroblast growth factor, IL-7, nerve growth factor, vascular endothelial growth factor, Fas, TNF receptor, Fit, Apo-1, p55, WSL-1, DR3, TRAMP, Apo-3, AIR, LARD, NGRF, DR4, DR5, KILLER, TRAIL-R2, TRICK2, DR6, Caspase ICE, Fos, c-jun, Sp-1, Ap-1, Ap-2, p38, p65Rel, MyD88, IRAK, TRAF6, IkB, Inactive NIK, SAP K, SAP-1, JNK, interferon response genes, NFkB, Bax, TRAIL, TRAILrec, TRAILrecDRC5, TRAIL-R3, TRAIL-R4, RANK, RANK LIGAND, Ox40, Ox40 LIGAND, NKG2D, MICA, MICB, NKG2A, NKG2B, NKG2C, NKG2E, NKG2F, TAP1, TAP2 and functional fragments thereof or a combination thereof.

[0299] In some embodiments adjuvant may be one or more proteins and/or nucleic acid molecules that encode proteins selected from the group consisting of: CCL-20, IL-12, IL-15, IL-28, CTACK, TECK, MEC or RANTES. Examples of IL-12 constructs and sequences are disclosed in PCT application No. PCT/US1997/019502 (published as WO98/017799) and corresponding U.S. application Ser. No. 08/956,865, and U.S. Provisional Application No. 61/569,600 filed Dec. 12, 2011, which are each incorporated herein by reference in their entireties. Examples of IL-15 constructs and sequences are disclosed in PCT application No. PCT/US04/18962 (published as WO2005/000235) and corresponding U.S. application Ser. No. 10/560,650, and in PCT application No. PCT/US07/00886 (published as WO2007/087178) and corresponding U.S. application Ser. No. 12/160,766, and in PCT Application Ser. No. PCT/US10/048,827 (published as WO2011/032179), which are each incorporated herein by reference in their entireties. Examples of IL-28 constructs and sequences are disclosed in PCT application no. PCT/US09/039648 (published as WO2009/124309) and corresponding U.S. application Ser. No. 12/936,192, which are each incorporated herein by reference in their entireties. Examples of RANTES and other constructs and sequences are disclosed in PCT application No. PCT/US 1999/004332 (published as WO99/043839) and corresponding U.S. application Ser. No. 09/622,452, which are each incorporated herein by reference in their entireties. Other examples of RANTES constructs and sequences are disclosed in PCT Application No. PCT/US Ser. No. 11/024,098 (published as WO2011/097640), which is incorporated herein by reference. Examples of RANTES and other constructs and sequences are disclosed in PCT Application No. PCT/US 1999/004332 and corresponding U.S. application Ser. No. 09/622,452, which are each incorporated herein by reference. Other examples of RANTES constructs and sequences are disclosed in PCT application No. PCT/US11/024098 (published as WO2011/097640), which is incorporated herein by reference in its entirety. Examples of chemokines CTACK, TECK and MEC constructs and sequences are disclosed in PCT Application No. PCT/US2005/042231 (published as WO2007/050095) and corresponding U.S. application Ser. No. 11/719,646, which are each incorporated herein by reference in their entireties. Examples of OX40 and other immunomodulators are disclosed in U.S. application Ser. No. 10/560,653, which is incorporated herein by reference in its entirety. Examples of DR5 and other immunomodulators are disclosed in U.S. application Ser. No. 09/622,452, which is incorporated herein by reference in its entirety.

[0300] The pharmaceutical composition may be formulated according to the mode of administration to be used. An injectable vaccine pharmaceutical composition may be sterile, pyrogen free and particulate free. An isotonic formulation or solution may be used. Additives for isotonicity may include sodium chloride, dextrose, mannitol, sorbitol, and lactose. The vaccine may comprise a vasoconstriction agent. The isotonic solutions may include phosphate buffered saline. Vaccine may further comprise stabilizers including gelatin and albumin. The stabilizing may allow the formulation to be stable at room or ambient temperature for extended periods of time such as LGS or polycations or polyanions to the vaccine formulation.

[0301] The vaccine can be a DNA or RNA vaccine. In some embodiments, the vaccine is a DNA vaccine. DNA vaccines are disclosed in U.S. Pat. Nos. 5,593,972, 5,739,118, 5,817,637, 5,830,876, 5,962,428, 5,981,505, 5,580,859, 5,703,055, and 5,676,594, which are incorporated herein fully by reference. The DNA vaccine can further comprise elements or reagents that inhibit it from integrating into the chromosome. Examples of attenuated live vaccines, those using recombinant vectors to foreign antigens, subunit vaccines and glycoprotein vaccines are described in U.S. Pat. Nos. 4,510,245; 4,797,368; 4,722,848; 4,790,987; 4,920,209; 5,017,487; 5,077,044; 5,110,587; 5,112,749; 5,174,993; 5,223,424; 5,225,336; 5,240,703; 5,242,829; 5,294,441; 5,294,548; 5,310,668; 5,387,744; 5,389,368; 5,424,065; 5,451,499; 5,453,364; 5,462,734; 5,470,734; 5,474,935; 5,482,713; 5,591,439; 5,643,579; 5,650,309; 5,698,202; 5,955,088; 6,034,298; 6,042,836; 6,156,319 and 6,589,529, which are each incorporated herein by reference in their entireties.

[0302] The genetic construct can also be part of a genome of a recombinant viral vector, including recombinant adenovirus, recombinant adenovirus associated virus and recombinant vaccinia. The genetic construct can be part of the genetic material in attenuated live microorganisms or recombinant microbial vectors which live in cells.

[0303] In some embodiments, the disclosure relates to a DNA vector pVAX1 comprising any one or more of the expressible nucleic acid sequences disclosed herein or an RNA transcript thereof. In some embodiments, the disclosure relates to a pharmaceutical composition comprising a nucleic acid sequence that includes one or a plurality of the expressible nucleic acid sequences disclosed herein or an RNA transcript thereof, and a pharmaceutically acceptable carrier.

### E. Methods

[0304] Disclosed are methods of vaccinating a subject comprising administering a therapeutically effective amount of any of the disclosed nucleic acid molecules, compositions, cells or pharmaceutical compositions to the subject. In some embodiments, the vaccination is against viral infection. In some embodiments, the viral infection is an infection of a virus from the family of Coronaviridae. In some embodiments, the viral infection is an infection of a coronavirus. In some embodiments, the viral infection is an infection of SARS-CoV. In some embodiments, the viral infection is an infection of HCoV NL63. In some embodiments, the viral infection is an infection of HKU1. In some embodiments, the viral infection is an infection of MERS-CoV. In some embodiments, the viral infection is an infection of SARS-CoV-2.

[0305] Disclosed are methods of inducing an immune response in a subject comprising administering to the subject any of the disclosed pharmaceutical compositions. In some embodiments, the methods are for inducing an immune response to a viral antigen in the subject. In some embodiments, the immune response induced by the disclosed methods is against a viral antigen from a virus from the family of Coronaviridae. In some embodiments, the immune response induced by the disclosed methods is against a viral antigen from a coronavirus. In some embodiments, the immune response induced by the disclosed methods is against a viral antigen from SARS-CoV. In some embodiments, the immune response induced by the disclosed methods is against a viral antigen from HCoV NL63. In some embodiments, the immune response induced by the disclosed methods is against a viral antigen from HKU1. In some embodiments, the immune response induced by the disclosed methods is against a viral antigen from MERS-CoV. In some embodiments, the immune response induced by the disclosed methods is against a viral antigen from SARS-CoV-2.

[0306] Disclosed are methods of neutralizing one or a plurality of viruses in a subject comprising administering to the subject any of the disclosed pharmaceutical compositions. In some embodiments, the virus being neutralized by the disclosed method is a virus from the family of Coronaviridae. In some embodiments, the virus being neutralized by the disclosed method is a coronavirus. In some embodiments, the virus being neutralized by the disclosed method is SARS-CoV. In some embodiments, the virus being neutralized by the disclosed method is HCoV NL63. In some embodiments, the virus being neutralized by the disclosed method is HKU1. In some embodiments, the virus being neutralized by the disclosed method is MERS-CoV. In some embodiments, the virus being neutralized by the disclosed method is SARS-CoV-2.

[0307] Disclosed are methods of neutralizing infection of one or a plurality of viruses in a subject comprising administering to the subject any of the disclosed pharmaceutical compositions. In some embodiments, the viral infection being neutralized by the disclosed method is an infection of a virus from the family of Coronaviridae. In some embodiments, the viral infection being neutralized by the disclosed method is an infection of coronavirus. In some embodiments, the viral infection being neutralized by the disclosed method is an infection of SARS-CoV. In some embodiments, the viral infection being neutralized by the disclosed method is an infection of HCoV NL63. In some embodiments, the viral infection being neutralized by the disclosed method is an infection of HKU1. In some embodiments, the viral infection being neutralized by the disclosed method is an infection of MERS-CoV. In some embodiments, the viral infection being neutralized by the disclosed method is an infection of SARS-CoV-2.

[0308] Disclosed are methods of stimulating a therapeutically effective antigen-specific immune response against a virus in a mammal infected with the virus comprising administering any of the disclosed pharmaceutical compositions. In some embodiments, the disclosed method is a method of stimulating a therapeutically effective antigen-specific immune response against a virus from the family of Coronaviridae. In some embodiments, the disclosed method is a method of stimulating a therapeutically effective antigen-specific immune response against a coronavirus. In some embodiments, the disclosed method is a method of stimulating a therapeutically effective antigen-specific immune response against SARS-CoV. In some embodiments, the disclosed method is a method of stimulating a therapeutically effective antigen-specific immune response against HCoV NL63. In some embodiments, the disclosed method is a method of stimulating a therapeutically effective antigen-specific immune response against HKU1. In some embodiments, the disclosed method is a method of stimulating a therapeutically effective antigen-specific immune response against MERS-CoV. In some embodiments, the disclosed method is a method of stimulating a therapeutically effective antigen-specific immune response against SARS-CoV-2.

[0309] Disclosed are methods of inducing expression of a self-assembling vaccine in a subject comprising administering any of the disclosed pharmaceutical compositions. Also disclosed are methods of treating a subject having a viral infection or susceptible to becoming infected with a virus comprising administering to the subject a therapeutically effective amount of any of the disclosed pharmaceutical compositions. In some embodiments, the viral infection is an infection of a virus from the family of Coronaviridae. In some embodiments, the viral infection is an infection of coronavirus. In some embodiments, the viral infection is an infection of SARS-CoV. In some embodiments, the viral infection is an infection of HCoV NL63. In some embodiments, the viral infection is an infection of HKU1. In some embodiments, the viral infection is an infection of MERS-CoV. In some embodiments, the viral infection is an infection of SARS-CoV-2.

[0310] The disclosed pharmaceutical compositions may be administered by any route of administration. Accordingly, in some embodiments, the administering can be accomplished by oral administration. In some embodiments, the administering can be accomplished by parenteral administration. In some embodiments, the administering can be accomplished by sublingual administration. In some embodiments, the administering can be accomplished by transdermal administration. In some embodiments, the administering can be accomplished by rectal administration. In some embodiments, the administering can be accomplished by transmucosal administration. In some embodiments, the administering can be accomplished by topical administration. In some embodiments, the administering can be accomplished by inhalation. In some embodiments, the administering can be accomplished by buccal administration. In some embodiments, the administering can be accomplished by intrapleural administration. In some embodiments, the administering can be accomplished by intravenous administration. In some embodiments, the administering can be accomplished by intraarterial administration. In some embodiments, the administering can be accomplished by intraperitoneal administration. In some embodiments, the administering can be accomplished by subcutaneous administration. In some embodiments, the administering can be accomplished by intramuscular administration. In some embodiments, the administering can be accomplished by intranasal administration. In some embodiments, the administering can be accomplished by intrathecal administration. In some embodiments, the administering can be accomplished by intraarticular administration. In some embodiments, the administering can be accomplished by intradermal administration. In some embodiments, the above modes of action are accomplished by injection of the pharmaceutical compositions disclosed herein. In some embodiments, the therapeutically effective dose can be from about 1 to about 30 micrograms of expressible nucleic acid sequence. In some embodiments, the therapeutically effective dose can be from about 0.001 micrograms of the composition per kilogram of subject to about 0.050 micrograms per kilogram of subject.

[0311] In some embodiments, any of the disclosed methods can be free of activating any mannose-binding lectin or complement process.

[0312] In some embodiments, the subject can be a human. In some embodiments, the subject is diagnosed with or suspected of having a viral infection. In some embodiments, the subject is diagnosed with or suspected of having an infection of a virus from the family of Coronaviridae. In some embodiments, the subject is diagnosed with or suspected of having an infection of coronavirus. In some embodiments, the subject is diagnosed with or suspected of having an infection of SARS-CoV. In some embodiments, the subject is diagnosed with or suspected of having an infection of HCoV NL63. In some embodiments, the subject is diagnosed with or suspected of having an infection of HKU1. In some embodiments, the subject is diagnosed with or suspected of having an infection of MERS-CoV. In some embodiments, the subject is diagnosed with or suspected of having an infection of SARS-CoV-2.

[0313] In some embodiments of the methods of inducing an immune response, the immune response can be an antigen-specific immune response. In some embodiments, the antigen-specific immune response can be an antigen-specific to SARS-CoV-2 antigen immune response. In some embodiments, the antigen-specific immune response can be a therapeutically effective CD-4+ antigen-specific SARS-CoV-2 immune response. In some embodiments, the antigen-specific immune response can be a therapeutically effective CD-8+ antigen-specific SARS-CoV-2 immune response. In some embodiments, the antigen-specific immune response can be a therapeutically effective CD-4+ and CD-8+ antigen-specific SARS-CoV-2 immune response.

[0314] In some embodiments, the methods are free of administering any polypeptide directly to the subject.

[0315] In some embodiments, any of the disclosed methods can further comprise administering to the subject a pharmaceutical composition comprising one or more pharmaceutically active agents, such as antiviral drugs, among many others. In some embodiments, the one or more pharmaceutically active agents include other anticoronarival medications used to inhibit coronavirus, for example nucleoside analog reverse transcriptase inhibitors, non-nucleoside reverse transcriptase inhibitors, and protease inhibitors. Among the available drugs that may be used as a pharmaceutically active agent are zidovudine or AZT (or Retrovir®), didanosine or DDI (or Videx®), stavudine or D4T (or Zerit®), lamivudine or 3TC (or Epivir®), zalcitabine or DDC (or Hivid®), abacavir succinate (or Ziagen”), tenofovir disoproxil fumarate salt (or Viread®), emtricitabine (or Emtriva®), Combivir® (contains 3TC and AZT), Trizivir® (contains abacavir, 3TC and AZT); three non-nucleoside reverse transcriptase inhibitors: nevirapine (or Viramune®), delavirdine (or Rescriptor®) and efavirenz (or Sustiva®), eight peptidomimetic protease inhibitors or approved formulations: saquinavir (or Invirase® or Fortovase”), indinavir (or Crixivan®), ritonavir (or Norvir®), nelfinavir (or Viracept”), amprenavir (or Agenerase®), atazanavir (Reyataz), fosamprenavir (or Lexiva), Kaletra® (contains lopinavir and ritonavir), and one fusion inhibitor enfuvirtide (or T-20 or Fuzeon®).

[0316] In some embodiments, the methods of inducing an immune response can include inducing a humoral or cellular immune response. A humoral immune response mainly refers to antibody production. A cellular immune response can include activation of CD4+ T-cells and activation CD8+ cells and associated cytotoxic activity. In one aspect, the present disclosure features a method of inducing an immune response in a subject, the method comprising administering to the subject in need thereof a pharmaceutically effective amount of any of the nucleic acid molecules comprising any one or a plurality of the disclosed expressible nucleic acid sequences or embodiments herein, or any one of the pharmaceutical compositions disclosed herein. In one aspect, the present disclosure features a method of inducing a CD8+ T cell immune response in a subject, the method comprising administering to the subject in need thereof a pharmaceutically effective amount of any of the nucleic acid molecules comprising any one or a plurality of the disclosed expressible nucleic acid sequences or embodiments herein, or any one of the pharmaceutical compositions disclosed herein.

[0317] In one aspect, the present disclosure features a method of enhancing an immune response in a subject, the method comprising administering to the subject in need thereof a pharmaceutically effective amount of any of the nucleic acid molecules comprising any one or a plurality of the disclosed expressible nucleic acid sequences or embodiments herein, or any one of the pharmaceutical compositions disclosed herein.

[0318] In one aspect, the present disclosure features a method of enhancing a CD8+ T cell immune response in a subject, the method comprising administering to the subject in need thereof a pharmaceutically effective amount of any of the nucleic acid molecules comprising any one or a plurality of the disclosed expressible nucleic acid sequences or embodiments herein, or any one of the pharmaceutical compositions disclosed herein.

[0319] In some embodiments, the subject has a viral infection and is in need of therapy for the viral infection. In some embodiments, the viral infection is an infection of a virus from the family of Coronaviridae. In some embodiments, the viral infection is an infection of coronavirus. In some embodiments, the viral infection is an infection of SARS-CoV. In some embodiments, the viral infection is an infection of HCoV NL63. In some embodiments, the viral infection is an infection of HKU1. In some embodiments, the viral infection is an infection of MERS-CoV. In some embodiments, the viral infection is an infection of SARS-CoV-2.

[0320] In some embodiments, the subject has previously been treated, and not responded to anti-viral therapy. In some embodiments, the nucleic acid molecule and/or the expressible nucleic acid sequence of the disclosure is administered to the subject by electroporation.

[0321] The vaccine may be administered by different routes including orally, parenterally, sublingually, transdermally, rectally, transmucosally, topically, via inhalation, via buccal administration, intrapleurally, intravenous, intraarterial, intraperitoneal, subcutaneous, intramuscular, intranasal intrathecal, and intraarticular or combinations thereof. For veterinary use, the composition may be administered as a suitably acceptable formulation in accordance with normal veterinary practice. The veterinarian can readily determine the dosing regimen and route of administration that is most appropriate for a particular animal. The vaccine may be administered by traditional syringes, needleless injection devices, “microprojectile bombardment gone guns,” or other physical methods such as electroporation (“EP”), “hydrodynamic method,” or ultrasound.

[0322] The plasmid of the vaccine may be delivered to the mammal by several well-known technologies including DNA injection (also referred to as DNA vaccination) with and without in vivo electroporation, liposome mediated, nanoparticle facilitated, recombinant vectors such as recombinant adenovirus, recombinant adenovirus associated virus and recombinant vaccinia. The antigen may be delivered via DNA injection and along with in vivo electroporation.

[0323] The vaccine or pharmaceutical composition can be administered by electroporation. Administration of the vaccine via electroporation of the plasmids of the vaccine may be accomplished using electroporation devices that can be configured to deliver to a desired tissue of a mammal a pulse of energy effective to cause reversible pores to form in cell membranes, and preferable the pulse of energy is a constant current similar to a preset current input by a user. The electroporation device may comprise an electroporation component and an electrode assembly or handle assembly. The electroporation component may include and incorporate one or more of the various elements of the electroporation devices, including controller, current waveform generator, impedance tester, waveform logger, input element, status reporting element, communication port, memory component, power source, and power switch. The electroporation can be accomplished using an in vivo electroporation device, for example CELLECTRA® EP system (Inovio Pharmaceuticals, Inc., Blue Bell, Pa.) or Elgen electroporator (Inovio Pharmaceuticals, Inc.) to facilitate transfection of cells by the plasmid.

[0324] The electroporation component may function as one element of the electroporation devices, and the other elements are separate elements (or components) in communication with the electroporation component. The electroporation component may function as more than one element of the electroporation devices, which may be in communication with still other elements of the electroporation devices separate from the electroporation component. The elements of the electroporation devices existing as parts of one electromechanical or mechanical device may not limited as the elements can function as one device or as separate elements in communication with one another. The electroporation component may be capable of delivering the pulse of energy that produces the constant current in the desired tissue, and includes a feedback mechanism. The electrode assembly may include an electrode array having a plurality of electrodes in a spatial arrangement, wherein the electrode assembly receives the pulse of energy from the electroporation component and delivers the same to the desired tissue through the electrodes. At least one of the plurality of electrodes is neutral during delivery of the pulse of energy and measures impedance in the desired tissue and communicates the impedance to the electroporation component. The feedback mechanism may receive the measured impedance and can adjust the pulse of energy delivered by the electroporation component to maintain the constant current.

[0325] A plurality of electrodes may deliver the pulse of energy in a decentralized pattern. The plurality of electrodes may deliver the pulse of energy in the decentralized pattern through the control of the electrodes under a programmed sequence, and the programmed sequence is input by a user to the electroporation component. The programmed sequence may comprise a plurality of pulses delivered in sequence, wherein each pulse of the plurality of pulses is delivered by at least two active electrodes with one neutral electrode that measures impedance, and wherein a subsequent pulse of the plurality of pulses is delivered by a different one of at least two active electrodes with one neutral electrode that measures impedance.

[0326] The feedback mechanism may be performed by either hardware or software. The feedback mechanism may be performed by an analog closed-loop circuit. The feedback occurs every 50 ρs, 20 ρs, 10 ρs or 1 ρs, but is preferably a real-time feedback or instantaneous (i.e., substantially instantaneous as determined by available techniques for determining response time). The neutral electrode may measure the impedance in the desired tissue and communicates the impedance to the feedback mechanism, and the feedback mechanism responds to the impedance and adjusts the pulse of energy to maintain the constant current at a value similar to the preset current. The feedback mechanism may maintain the constant current continuously and instantaneously during the delivery of the pulse of energy.

[0327] Examples of electroporation devices and electroporation methods that may facilitate delivery of the DNA vaccines of the present disclosure, include those described in U.S. Pat. No. 7,245,963 by Draghia-Akli, et al., U.S. Patent Pub. 2005/0052630 submitted by Smith, et al., the contents of which are hereby incorporated by reference in their entirety. Other electroporation devices and electroporation methods that may be used for facilitating delivery of the DNA vaccines include those provided in co-pending and co-owned U.S. patent application Ser. No. 11/874,072, filed Oct. 17, 2007, which claims the benefit under 35 USC 119(e) to U.S. Provisional Application Ser. No. 60/852,149, filed Oct. 17, 2006, and 60/978,982, filed Oct. 10, 2007, all of which are hereby incorporated in their entirety.

[0328] U.S. Pat. No. 7,245,963 by Draghia-Akli, et al. describes modular electrode systems and their use for facilitating the introduction of a biomolecule into cells of a selected tissue in a body or plant. The modular electrode systems may comprise a plurality of needle electrodes; a hypodermic needle; an electrical connector that provides a conductive link from a programmable constant-current pulse controller to the plurality of needle electrodes; and a power source. An operator can grasp the plurality of needle electrodes that are mounted on a support structure and firmly insert them into the selected tissue in a body or plant. The biomolecules are then delivered via the hypodermic needle into the selected tissue. The programmable constant-current pulse controller is activated and constant-current electrical pulse is applied to the plurality of needle electrodes. The applied constant-current electrical pulse facilitates the introduction of the biomolecule into the cell between the plurality of electrodes. The entire content of U.S. Pat. No. 7,245,963 is hereby incorporated by reference in its entirety.

[0329] U.S. Patent Pub. 2005/0052630 submitted by Smith, et al. describes an electroporation device which may be used to effectively facilitate the introduction of a biomolecule into cells of a selected tissue in a body or plant. The electroporation device comprises an electro-kinetic device (“EKD device”) whose operation is specified by software or firmware. The EKD device produces a series of programmable constant-current pulse patterns between electrodes in an array based on user control and input of the pulse parameters, and allows the storage and acquisition of current waveform data. The electroporation device also comprises a replaceable electrode disk having an array of needle electrodes, a central injection channel for an injection needle, and a removable guide disk. The entire content of U.S. Patent Pub. 2005/0052630 is hereby incorporated by reference in its entirety. The electrode arrays and methods described in U.S. Pat. No. 7,245,963 and U.S. Patent Pub. 2005/0052630 may be adapted for deep penetration into not only tissues such as muscle, but also other tissues or organs. Because of the configuration of the electrode array, the injection needle (to deliver the biomolecule of choice) is also inserted completely into the target organ, and the injection is administered perpendicular to the target issue, in the area that is pre-delineated by the electrodes. The electrodes described in U.S. Pat. No. 7,245,963 and U.S. Patent Pub. 2005/005263 are preferably 20 mm long and 21 gauge.

[0330] Additionally, contemplated in some embodiments that incorporate electroporation devices and uses thereof, there are electroporation devices that are those described in the following patents: U.S. Pat. No. 5,273,525 issued Dec. 28, 1993, U.S. Pat. No. 6,110,161 issued Aug. 29, 2000, 6,261,281 issued Jul. 17, 2001, and U.S. Pat. No. 6,958,060 issued Oct. 25, 2005, and U.S. Pat. No. 6,939,862 issued Sep. 6, 2005. Furthermore, patents covering subject matter provided in U.S. Pat. No. 6,697,669 issued Feb. 24, 2004, which concerns delivery of DNA using any of a variety of devices, and U.S. Pat. No. 7,328,064 issued Feb. 5, 2008, drawn to a method of injecting DNA are contemplated herein. The above-patents are incorporated by reference in their entireties.

[0331] Methods of preparing the nucleic acid sequences are disclosed. In some embodiments, plasmid sequences with one or more multiple cloning sites my be purchased from commercially available vendors and the expressible nucleic acid sequences disclosed herein may be ligated into the plasmids after a digestion with a known restriction enzyme needed to cute the plasmid DNA. In another alternative embodiment, membrane-based purification methods disclosed herein offer reduced cost, high binding capacity, and high flow rates, resulting in a superior purification process. The purification process is further demonstrated to produce plasmid products substantially free of genomic DNA, RNA, protein, and endotoxin.

[0332] In some embodiments, all of the described aspects of the present disclosure are advantageously combined to provide an integrated process for preparing substantially purified cellular components of interest from cells in bioreactors. Again, the cells are most preferably plasmid-containing cells, and the cellular components of interest are most preferably plasmids. The substantially purified plasmids are suitable for various uses, including, but not limited to, gene therapy, plasmid-mediated therapy, as DNA vaccines for human, veterinary, or agricultural use, or for any other application that requires large quantities of purified plasmid. In this aspect, all of the advantages described for individual aspects of the present disclosure accrue to the complete, integrated process, providing a highly advantageous method that is rapid, scalable, and inexpensive. Enzymes and other animal-derived or biologically sourced products are avoided, as are carcinogenic, mutagenic, or otherwise toxic substances. Potentially flammable, explosive, or toxic organic solvents are similarly avoided.

[0333] One aspect of the present disclosure is an apparatus for isolating plasmid DNA from a suspension of cells having both plasmid DNA and genomic DNA. An embodiment of the apparatus comprises a first tank and second tank in fluid communication with a mixer. The first tank is used for holding the suspension cells and the second tank is used for holding a lysis solution. The suspension of cells from the first tank and the lysis solution from the second tank are both allowed to flow into the mixer forming a lysate mixture or lysate fluid. The mixer comprises a high shear, low residence-time mixing device with a residence time of equal to or less than about 1 second. In a preferred embodiment, the mixing device comprises a flow through, rotor/stator mixer or emulsifier having linear flow rates from about 0.1 L/min to about 20 L/min. The lysate-mixture flows from the mixer into a holding coil for a period of time sufficient to lyse the cells and forming a cell lysate suspension, wherein the lysate-mixture has resident time in the holding coil in a range of about 2-8 minutes with a continuous linear flow rate.

[0334] The cell lysate suspension is then allowed to flow into a bubble-mixer chamber for precipitation of cellular components from the plasmid DNA. In the bubble mixer chamber, the cell lysate suspension and a precipitation solution or a neutralization solution from a third tank are mixed together using gas bubbles, which forms a mixed gas suspension comprising a precipitate and an unclarified lysate or plasmid containing fluid. The precipitate of the mixed gas suspension is less dense than the plasmid containing fluid, which facilitates the separation of the precipitate from the plasmid containing fluid. The precipitate is removed from the mixed gas suspension to give a clarified lysate having the plasmid DNA, and the precipitate having cellular debris and genomic DNA.

[0335] In some embodiments, the bubble mixer-chamber comprises a closed vertical column with a top, a bottom, a first, and a second side with a vent proximal to the top of the column. A first inlet port of the bubble mixer-chamber is on the first side proximal to the bottom of the column and in fluid communication with the holding coil. A second inlet port of the bubble mixer-chamber is proximal to the bottom on a second side opposite of the first inlet port and in fluid communication with a third tank, wherein the third tank is used for holding a precipitation or a neutralization solution. A third inlet port of the bubble mixer-chamber is proximal to the bottom of the column and about in the middle of the first and second inlets and is in fluid communication with a gas source the third inlet entering the bubble-mixer-chamber. A preferred embodiment utilizes a sintered sparger inside the closed vertical column of the third inlet port. The outlet port exiting the bubble mixing chamber is proximal to the top of the closed vertical column. The outlet port is in fluid communication with a fourth tank, wherein the mixed gas suspension containing the plasmid DNA is allowed to flow from the bubble-mixer-chamber into the fourth tank. The fourth tank is used for separating the precipitate of the mixed gas suspension having a plasmid containing fluid, and can also include an impeller mixer sufficient to provide uniform mixing of fluid without disturbing the precipitate. A fifth tank is used for a holding the clarified lysate or clarified plasmid containing fluid. The clarified lysate is then filtered at least once. A first filter has a particle size limit of about 5-10 μm and the second filter has a cut of about 0.2 μm. Although gravity, pressure, vacuum, or a mixture thereof can be used for transporting: suspension of cells; lysis solutions; precipitation solutions; neutralization solutions; or mixed gas suspensions from any of the tanks to mixers, holding coils or different tanks, pumps are utilized in a preferred embodiments. In a more preferred embodiment, at least one pump having a linear flow rate from about 0.1 to about 1 ft/second is used.

[0336] In another specific embodiment, a Y-connector having a having a first bifurcated branch, a second bifurcated branch and an exit branch is used to contact the cell suspension and the lysis solutions before they enter the high shear, low residence-time mixing device. The first tank holding the cell suspension is in fluid communication with the first bifurcated branch of the Y-connector through the first pump and the second tank holding the lysis solution is in fluid communication with the second bifurcated branch of the Y-connector through the second pump. The high shear, low residence-time mixing device is in fluid communication with an exit branch of the Y-connector, wherein the first and second pumps provide a linear flow rate of about 0.1 to about 2 ft/second for a contacted fluid exiting the Y-connector.

[0337] Another specific aspect of the present disclosure is a method of substantially separating plasmid DNA and genomic DNA from a bacterial cell lysate. The method comprises: delivering a cell lysate into a chamber; delivering a precipitation fluid or a neutralization fluid into the chamber; mixing the cell lysate and the precipitation fluid or a neutralization fluid in the chamber with gas bubbles forming a gas mixed suspension, wherein the gas mixed suspension comprises the plasmid DNA in a fluid portion (i.e. an unclarified lysate) and the genomic DNA is in a precipitate that is less dense than the fluid portion; floating the precipitate on top of the fluid portion; removing the fluid portion from the precipitate forming a clarified lysate, whereby the plasmid DNA in the clarified lysate is substantially separated from genomic DNA in the precipitate. In some embodiments, the chamber is the bubble mixing chamber as described above; the lysing solution comprises an alkali, an acid, a detergent, an organic solvent, an enzyme, a chaotrope, or a denaturant; the precipitation fluid or the neutralization fluid comprises potassium acetate, ammonium acetate, or a mixture thereof; and the gas bubbles comprise compressed air or an inert gas. Additionally, the decanted-fluid portion containing the plasmid DNA is preferably further purified with one or more purification steps selected from a group consisting of: ion exchange, hydrophobic interaction, size exclusion, reverse phase purification, endotoxin depletion, affinity purification, adsorption to silica, glass, or polymeric materials, expanded bed chromatography, mixed mode chromatography, displacement chromatography, hydroxyapatite purification, selective precipitation, aqueous two-phase purification, DNA condensation, thiophilic purification, ion-pair purification, metal chelate purification, filtration through nitrocellulose, or ultrafiltration.

[0338] In some embodiments, a method for isolating a plasmid DNA from cells comprising: mixing a suspension of cells having the plasmid DNA and genomic DNA with a lysis solution in a high-shear-low-residence-time-mixing-device for a first period of time forming a cell lysate fluid; incubating the cell lysate fluid for a second period of time in a holding coil forming a cell lysate suspension; delivering the cell lysate suspension into a chamber; delivering a precipitation/neutralization fluid into the chamber; mixing the cell lysate suspension and the a precipitation/neutralization fluid in the chamber with gas bubbles forming a gas mixed suspension, wherein the gas mixed suspension comprises an unclarified lysate containing the plasmid DNA and a precipitate containing the genomic DNA, wherein the precipitate is less dense than the unclarified lysate; floating the precipitate on top of the unclarified lysate; removing the precipitate from the unclarified lysate forming a clarified lysate, whereby the plasmid DNA is substantially separated from genomic DNA; precipitating the plasmid DNA from the clarified lysate forming a precipitated plasmid DNA; and resuspending the precipitated plasmid DNA in an aqueous solution.

[0339] The disclosure also relates to a method of producing a polypeptide of interest in a mammalian cell, the method comprising contacting the cell with a composition comprising one or a plurality of the RNA molecules disclosed herein. In some embodiments, the therapeutic and/or prophylactic agent is an mRNA, and wherein the mRNA encodes the polypeptide of interest, whereby the mRNA is capable of being translated in the cell to produce the polypeptide of interest (e.g., nanoparticle or trimer of the disclosure). Compositions comprising RNA nucleic acid sequences of the disclosure can be delivered via lipid-containing nanoparticles and/or modification of the RNA nucleic acid sequence encoding the one or more viral polypeptides.

[0340] In some embodiments, the composition includes at least one RNA polynucleotide having an open reading frame encoding at least one SARS-CoV-2 antigenic polypeptide having at least one modification, at least one 5; terminal cap, and is formulated within a lipid nanoparticle.

[0341] In some embodiments, a 5′ terminal cap is 7mG(5′)ppp(5′)NlmpNp. In some embodiments, at least one chemical modification is selected from the group consisting of pseudouridine, N1-methylpseudouridine, N1-ethylpseudouridine, 2-thiouridine, 4′-thiouridine, 5-methylcytosine, 2-thio-1-methyl-1-deaza-pseudouridine, 2-thio-1-methyl-pseudouridine, 2-thio-5-aza-uridine, 2-thio-dihydropseudouridine, 2-thio-dihydrouridine, 2-thio-pseudouridine, 4-methoxy-2-thio-pseudouridine, 4-methoxy-pseudouridine, 4-thio-1-methyl-pseudouridine, 4-thio-pseudouridine, 5-aza-uridine, dihydropseudouridine, 5-methoxyuridine, and 2′-O-methyl uridine.

[0342] In some embodiments, a lipid nanoparticle comprises a cationic lipid, a PEG-modified lipid, a sterol, and a non-cationic lipid. In some embodiments, a cationic lipid is an ionizable cationic lipid and the non-cationic lipid is a neutral lipid, and the sterol is a cholesterol. In some embodiments, a cationic lipid is selected from the group consisting of 2,2-dilinoleyl-4-dimethylaminoethyl-[1,3]-dioxolane (DLin-KC2-DMA), dilinoleyl-methyl-4-dimethylaminobutyrate (DLin-MC3-DMA), di((Z)-non-2-en-1-yl) 9-((4-(dimethylamino)butanoyl)oxy)heptadecanedioate (L319), (12Z,15Z)-N,N-dimethyl-2-nonylhenicosa-12,15-dien-1-amine (L608), and N,N-dimethyl-1-[(1S,2R)-2-octylcyclopropyl]heptadecan-8-amine (L530).

[0343] In some embodiments, SARS-CoV-2 RNA (e.g. mRNA) vaccines are formulated in a lipid nanoparticle. In some embodiments, SARS-CoV-2 RNA (e.g. mRNA) vaccines are formulated in a lipid-polycation complex, referred to as a cationic lipid nanoparticle. The formation of the lipid nanoparticle may be accomplished by methods known in the art and/or as described in U.S. Publication No. 20120178702, herein incorporated by reference in its entirety. As a non-limiting example, the polycation may include a cationic peptide or a polypeptide such as, but not limited to, polylysine, polyornithine and/or polyarginine and the cationic peptides described in International Publication No. WO2012013326 or U.S. Publication No. US20130142818; each of which is herein incorporated by reference in its entirety. In some embodiments, SARS-CoV-2 RNA (e.g. mRNA) vaccines are formulated in a lipid nanoparticle that includes a non-cationic lipid such as, but not limited to, cholesterol or dioleoyl phosphatidylethanolamine (DOPE).

[0344] A lipid nanoparticle formulation may be influenced by, but not limited to, the selection of the cationic lipid component, the degree of cationic lipid saturation, the nature of the PEGylation, ratio of all components, and biophysical parameters such as size. In one example by Semple et al. (Nature Biotech. 2010 28:172-176; herein incorporated by reference in its entirety), the lipid nanoparticle formulation is composed of 57.1% cationic lipid, 7.1% dipalmitoylphosphatidylcholine, 34.3% cholesterol, and 1.4% PEG-c-DMA. As another example, changing the composition of the cationic lipid was shown to more effectively deliver siRNA to various antigen presenting cells (Basha et al. Mol Ther. 2011 19:2186-2200; herein incorporated by reference in its entirety).

[0345] In some embodiments, lipid nanoparticle formulations may comprise 35% to 45% cationic lipid, 40% to 50% cationic lipid, 50% to 60% cationic lipid and/or 55% to 65% cationic lipid. In some embodiments, the ratio of lipid to RNA (e.g., mRNA) in lipid nanoparticles may be 5:1 to 20:1, 10:1 to 25:1, 15:1 to 30:1, and/or at least 30:1.

[0346] In some embodiments, the ratio of PEG in the lipid nanoparticle formulations may be increased or decreased and/or the carbon chain length of the PEG lipid may be modified from C14 to C18 to alter the pharmacokinetics and/or biodistribution of the lipid nanoparticle formulations. As a non-limiting example, lipid nanoparticle formulations may contain 0.5% to 3.0%, 1.0% to 3.5%, 1.5% to 4.0%, 2.0% to 4.5%, 2.5% to 5.0%, and/or 3.0% to 6.0% of the lipid molar ratio of PEG-c-DOMG (R-3-[(co-methoxy-poly(ethyleneglycol)2000) carbamoyl)]-1,2-dimyristyloxypropyl-3-amine) (also referred to herein as PEG-DOMG) as compared to the cationic lipid, DSPC, and cholesterol. In some embodiments, the PEG-c-DOMG may be replaced with a PEG lipid such as, but not limited to, PEG-DSG (1,2-Distearoyl-sn-glycerol, methoxypolyethylene glycol), PEG-DMG (1,2-Dimyristoyl-sn-glycerol) and/or PEG-DPG (1,2-Dipalmitoyl-sn-glycerol, methoxypolyethylene glycol). The cationic lipid may be selected from any lipid known in the art such as, but not limited to, DLin-MC3-DMA, DLin-DMA, C12-200, and DLin-KC2-DMA.

[0347] In some embodiments, a SARS-CoV-2 RNA (e.g., mRNA) vaccine formulation is a nanoparticle that comprises at least one lipid. The lipid may be selected from, but is not limited to, DLin-DMA, DLin-K-DMA, 98N12-5, C12-200, DLin-MC3-DMA, DLin-KC2-DMA, DODMA, PLGA, PEG, PEG-DMG, (12Z,15Z)-N,N-dimethyl-2-nonylhenicosa-12,15-dien-1-amine (L608), N,N-dimethyl-1-[(1S,2R)-2-octylcyclopropyl]heptadecan-8-amine (L530), PEGylated lipids, and amino alcohol lipids.

[0348] In some embodiments, a lipid nanoparticle formulation includes 25% to 75% on a molar basis of a cationic lipid selected from the group consisting of 2,2-dilinoleyl-4-dimethylaminoethyl-[1,3]-dioxolane (DLin-KC2-DMA), dilinoleyl-methyl-4-dimethylaminobutyrate (DLin-MC3-DMA), and di((Z)-non-2-en-1-yl) 9-((4-(dimethylamino)butanoyl)oxy)heptadecanedioate (L319), e.g., 35% to 65%, 45% to 65%, 60%, 57.5%, 50% or 40% on a molar basis.

[0349] In some embodiments, a lipid nanoparticle formulation includes 0.5% to 15% on a molar basis of the neutral lipid, e.g., 3% to 12%, 5% to 10% or 15%, 10%, or 7.5% on a molar basis. Examples of neutral lipids include, without limitation, DSPC, POPC, DPPC, DOPE, and SM. In some embodiments, the formulation includes 5% to 50% on a molar basis of the sterol (e.g., 15% to 45%, 20% to 40%, 40%, 38.5%, 35%, or 31% on a molar basis. A non-limiting example of a sterol is cholesterol. In some embodiments, a lipid nanoparticle formulation includes 0.5% to 20% on a molar basis of the PEG or PEG-modified lipid (e.g., 0.5% to 10%, 0.5% to 5%, 1.5%, 0.5%, 1.5%, 3.5%, or 5% on a molar basis. In some embodiments, a PEG or PEG modified lipid comprises a PEG molecule of an average molecular weight of 2,000 Da. In some embodiments, a PEG or PEG modified lipid comprises a PEG molecule of an average molecular weight of less than 2,000, for example around 1,500 Da, around 1,000 Da, or around 500 Da. Non-limiting examples of PEG-modified lipids include PEG-distearoyl glycerol (PEG-DMG) (also referred herein as PEG-C14 or C14-PEG), and PEG-cDMA (further discussed in Reyes et al. J. Controlled Release, 107, 276-287 (2005) the content of which is herein incorporated by reference in its entirety).

[0350] In some embodiments, lipid nanoparticle formulations include 25-75% of a cationic lipid selected from the group consisting of 2,2-dilinoleyl-4-dimethylaminoethyl-[1,3]-dioxolane (DLin-KC2-DMA), dilinoleyl-methyl-4-dimethylaminobutyrate (DLin-MC3-DMA), and di((Z)-non-2-en-1-yl) 9-((4-(dimethylamino)butanoyl)oxy)heptadecanedioate (L319), 0.5-15% of the neutral lipid, 5-50% of the sterol, and 0.5-20% of the PEG or PEG-modified lipid on a molar basis.

[0351] In some embodiments, lipid nanoparticle formulations include 35-65% of a cationic lipid selected from the group consisting of 2,2-dilinoleyl-4-dimethylaminoethyl-[1,3]-dioxolane (DLin-KC2-DMA), dilinoleyl-methyl-4-dimethylaminobutyrate (DLin-MC3-DMA), and di((Z)-non-2-en-1-yl) 9-((4-(dimethylamino)butanoyl)oxy)heptadecanedioate (L319), 3-12% of the neutral lipid, 15-45% of the sterol, and 0.5-10% of the PEG or PEG-modified lipid on a molar basis.

[0352] In some embodiments, lipid nanoparticle formulations include 45-65% of a cationic lipid selected from the group consisting of 2,2-dilinoleyl-4-dimethylaminoethyl-[1,3]-dioxolane (DLin-KC2-DMA), dilinoleyl-methyl-4-dimethylaminobutyrate (DLin-MC3-DMA), and di((Z)-non-2-en-1-yl) 9-((4-(dimethylamino)butanoyl)oxy)heptadecanedioate (L319), 5-10% of the neutral lipid, 25-40% of the sterol, and 0.5-10% of the PEG or PEG-modified lipid on a molar basis.

[0353] In some embodiments, lipid nanoparticle formulations include 60% of a cationic lipid selected from the group consisting of 2,2-dilinoleyl-4-dimethylaminoethyl-[1,3]-dioxolane (DLin-KC2-DMA), dilinoleyl-methyl-4-dimethylaminobutyrate (DLin-MC3-DMA), and di((Z)-non-2-en-1-yl) 9-((4-(dimethylamino)butanoyl)oxy)heptadecanedioate (L319), 7.5% of the neutral lipid, 31% of the sterol, and 1.5% of the PEG or PEG-modified lipid on a molar basis.

[0354] Some embodiments of the present disclosure provide a SARS-CoV-2 vaccine that includes at least one ribonucleic acid (RNA) polynucleotide having an open reading frame encoding at least one SARS-CoV-2 antigenic polypeptide, wherein at least about 80% of the uracil in the open reading frame have a chemical modification, optionally wherein the SARS-CoV-2 vaccine is formulated in a lipid nanoparticle. In some embodiments, the RNA vaccine pharmaceutical compositions may be formulated in liposomes such as, but not limited to, DiLa2 liposomes (Marina Biotech, Bothell, Wash.), SMARTICLES® (Marina Biotech, Bothell, Wash.), neutral DOPC (1,2-dioleoyl-sn-glycero-3-phosphocholine) based liposomes (e.g., siRNA delivery for ovarian cancer (Landen et al. Cancer Biology & Therapy 2006 5(12)1708-1713); herein incorporated by reference in its entirety) and hyaluronan-coated liposomes (Quiet Therapeutics, Israel). In some embodiments, the RNA vaccines may be formulated in a lyophilized gel-phase liposomal composition as described in U.S. Publication No. US2012060293, herein incorporated by reference in its entirety.

[0355] The nanoparticle formulations may comprise a phosphate conjugate. The phosphate conjugate may increase in vivo circulation times and/or increase the targeted delivery of the nanoparticle. Phosphate conjugates for use with the present invention may be made by the methods described in International Publication No. WO2013033438 or U.S. Publication No. US20130196948, the content of each of which is herein incorporated by reference in its entirety. As a non-limiting example, the phosphate conjugates may include a compound of any one of the formulas described in International Publication No. WO2013033438, herein incorporated by reference in its entirety. In particular, the present invention relates to a pharmaceutical composition comprising nanoparticles which comprise RNA encoding at least one antigen, wherein:
[0356] (i) the number of positive charges in the nanoparticles does not exceed the number of negative charges in the nanoparticles and/or
[0357] (ii) the nanoparticles have a neutral or net negative charge and/or
[0358] (iii) the charge ratio of positive charges to negative charges in the nanoparticles is 1.4:1 or less and/or
[0359] (iv) the zeta potential of the nanoparticles is 0 or less.

[0360] In some embodiments, the nanoparticles described herein are colloidally stable for at least 2 hours in the sense that no aggregation, precipitation or increase of size and polydispersity index by more than 30% as measured by dynamic light scattering takes place. In some embodiments, the charge ratio of positive charges to negative charges in the nanoparticles is between 1.4:1 and 1:8, preferably between 1.2:1 and 1:4, e.g. between 1:1 and 1:3 such as between 1:1.2 and 1:2, 1:1.2 and 1:1.8, 1:1.3 and 1:1.7, in particular between 1:1.4 and 1:1.6, such as about 1:1.5. In some embodiments, the zeta potential of the nanoparticles is −5 or less, −10 or less, −15 or less, −20 or less or −25 or less. In various embodiments, the zeta potential of the nanoparticles is −35 or higher, −30 or higher or −25 or higher. In some embodiments, the nanoparticles have a zeta potential from 0 mV to −50 mV, preferably 0 mV to −40 mV or −10 mV to −30 mV.

[0361] In some embodiments pharmaceutical compositions of the disclosure comprise a nanoparticle or a liposome that encapsulates a DNA, RNA or DNA/RNA hybrid comprising at least one expressible nucleic acid sequence. Liposomes are microscopic lipidic vesicles often having one or more bilayers of a vesicle-forming lipid, such as a phospholipid, and are capable of encapsulating a drug. Different types of liposomes may be employed in the context of the present invention, including, without being limited thereto, multilamellar vesicles (MLV), small unilamellar vesicles (SUV), large unilamellar vesicles (LUV), sterically stabilized liposomes (SSL), multivesicular vesicles (MV), and large multivesicular vesicles (LMV) as well as other bilayered forms known in the art. The size and lamellarity of the liposome will depend on the manner of preparation and the selection of the type of vesicles to be used will depend on the preferred mode of administration. There are several other forms of supramolecular organization in which lipids may be present in an aqueous medium, comprising lamellar phases, hexagonal and inverse hexagonal phases, cubic phases, micelles, reverse micelles composed of monolayers. These phases may also be obtained in the combination with DNA or RNA, and the interaction with RNA and DNA may substantially affect the phase state. The described phases may be present in the nanoparticulate RNA formulations of the present invention.

[0362] For formation of RNA lipoplexes from RNA and liposomes, any suitable method of forming liposomes can be used so long as it provides the envisaged RNA lipoplexes. Liposomes may be formed using standard methods such as the reverse evaporation method (REV), the ethanol injection method, the dehydration-rehydration method (DRV), sonication or other suitable methods.

[0363] After liposome formation, the liposomes can be sized to obtain a population of liposomes having a substantially homogeneous size range.

[0364] Bilayer-forming lipids have typically two hydrocarbon chains, particularly acyl chains, and a head group, either polar or nonpolar. Bilayer-forming lipids are either composed of naturally-occurring lipids or of synthetic origin, including the phospholipids, such as phosphatidylcholine, phosphatidylethanolamine, phosphatide acid, phosphatidylinositol, and sphingomyelin, where the two hydrocarbon chains are typically between about 14-22 carbon atoms in length, and have varying degrees of unsaturation. Other suitable lipids for use in the composition of the present invention include glycolipids and sterols such as cholesterol and its various analogs which can also be used in the liposomes.

[0365] Cationic lipids typically have a lipophilic moiety, such as a sterol, an acyl or diacyl chain, and have an overall net positive charge. The head group of the lipid typically carries the positive charge. The cationic lipid preferably has a positive charge of 1 to 10 valences, more preferably a positive charge of 1 to 3 valences, and more preferably a positive charge of 1 valence. Examples of cationic lipids include, but are not limited to 1,2-di-O-octadecenyl-3-trimethylammonium propane (DOTMA); dimethyldioctadecylammonium (DDAB); 1,2-dioleoyl-3-trimethylammonium-propane (DOTAP); 1,2-dioleoyl-3-dimethylammonium-propane (DODAP); 1,2-diacyloxy-3-dimethylammonium propanes; 1,2-dialkyloxy-3-dimethylammonium propanes; dioctadecyldimethyl ammonium chloride (DODAC), 1,2-dimyristoyloxypropyl-1,3-dimethylhydroxyethyl ammonium (DMRIE), and 2,3-dioleoyloxy-N-[2(spermine carboxamide)ethyl]-N,N-dimethyl-1-propanamium trifluoroacetate (DOSPA). Preferred are DOTMA, DOTAP, DODAC, and DOSPA. Most preferred is DOTMA.

[0366] In addition, the nanoparticles described herein preferably further include a neutral lipid in view of structural stability and the like. The neutral lipid can be appropriately selected in view of the delivery efficiency of the RNA-lipid complex. Examples of neutral lipids include, but are not limited to, 1,2-di-(9Z-octadecenoyl)-sn-glycero-3-phosphoethanolamine (DOPE), 1,2-dioleoyl-sn-glycero-3-phosphocholine (DOPC), diacylphosphatidyl choline, diacylphosphatidyl ethanol amine, ceramide, sphingoemyelin, cephalin, sterol, and cerebroside. Preferred is DOPE and/or DOPC. Most preferred is DOPE. In the case where a cationic liposome includes both a cationic lipid and a neutral lipid, the molar ratio of the cationic lipid to the neutral lipid can be appropriately determined in view of stability of the liposome and the like.

[0367] According to one embodiment, the nanoparticles described herein may comprise phospholipids. The phospholipids may be a glycerophospholipid. Examples of glycerophospholipid include, without being limited thereto, three types of lipids: (i) zwitterionic phospholipids, which include, for example, phosphatidylcholine (PC), egg yolk phosphatidylcholine, soybean-derived PC in natural, partially hydrogenated or fully hydrogenated form, dimyristoyl phosphatidylcholine (DMPC) sphingomyelin (SM); (ii) negatively charged phospholipids: which include, for example, phosphatidylserine (PS), phosphatidylinositol (PI), phosphatidic acid (PA), phosphatidylglycerol (PG) dipalmipoyl PG, dimyristoyl phosphatidylglycerol (DMPG); synthetic derivatives in which the conjugate renders a zwitterionic phospholipid negatively charged such is the case of methoxy-polyethylene,glycol-distearoyl phosphatidylethanolamine (mPEG-DSPE); and (iii) cationic phospholipids, which include, for example, phosphatidylcholine or sphingomyelin of which the phosphomonoester was O-methylated to form the cationic lipids.

[0368] Association of RNA to the lipid carrier can occur, for example, by the RNA filling interstitial spaces of the carrier, such that the carrier physically entraps the RNA, or by covalent, ionic, or hydrogen bonding, or by means of adsorption by non-specific bonds. Whatever the mode of association, the RNA must retain its therapeutic, i.e. antigen-encoding, properties.

[0369] In some embodiments, the nanoparticles comprise at least one lipid. In some embodiments, the nanoparticles comprise at least one cationic lipid. The cationic lipid can be monocationic or polycationic. Any cationic amphiphilic molecule, eg, a molecule which comprises at least one hydrophilic and lipophilic moiety is a cationic lipid within the meaning of the present invention. In some embodiments, the positive charges are contributed by the at least one cationic lipid and the negative charges are contributed by the RNA. In some embodiments, the nanoparticles comprises at least one helper lipid. The helper lipid may be a neutral or an anionic lipid. The helper lipid may be a natural lipid, such as a phospholipid or an analogue of a natural lipid, or a fully synthetic lipid, or lipid-like molecule, with no similarities with natural lipids. In some embodiments, the cationic lipid and/or the helper lipid is a bilayer forming lipid.

[0370] In some embodiments, the at least one cationic lipid comprises 1,2-di-O-octadecenyl-3-trimethylammonium propane (DOTMA) or analogs or derivatives thereof and/or 1,2-dioleoyl-3-trimethylammonium-propane (DOTAP) or analogs or derivatives thereof. In some embodiments, the at least one helper lipid comprises 1,2-di-(9Z-octadecenoyl)-sn-glycero-3-phosphoethanolamine (DOPE) or analogs or derivatives thereof, cholesterol (Chol) or analogs or derivatives thereof and/or 1,2-dioleoyl-sn-glycero-3-phosphocholine (DOPC) or analogs or derivatives thereof. In some embodiments, the molar ratio of the at least one cationic lipid to the at least one helper lipid is from 10:0 to 3:7, preferably 9:1 to 3:7, 4:1 to 1:2, 4:1 to 2:3, 7:3 to 1:1, or 2:1 to 1:1, preferably about 1:1. In some embodiments, in this ratio, the molar amount of the cationic lipid results from the molar amount of the cationic lipid multiplied by the number of positive charges in the cationic lipid. In various embodiments, the lipids are not functionalized such as functionalized by mannose, histidine and/or imidazole, the nanoparticles do not comprise a targeting ligand such as mannose functionalized lipids and/or the nanoparticles do not comprise one or more of the following: pH dependent compounds, cationic polymers such as polymers containing histidine and/or polylysine, wherein the polymers may optionally be PEGylated and/or histidylated, or divalent ions such as Ca 2+.

[0371] In various embodiments, the RNA nanoparticles may comprise peptides, preferentially with a molecular weight of up to 2500 Da.

[0372] In the nanoparticles described herein the lipid may form a complex with and/or may encapsulate the RNA. In some embodiments, the nanoparticles comprise a lipoplex or liposome. In some embodiments, the lipid is comprised in a vesicle encapsulating said RNA. The vesicle may be a multilamellar vesicle, an unilamellar vesicle, or a mixture thereof. The vesicle may be a liposome. In some embodiments, the nanoparticles are lipoplexes comprising DOTMA and DOPE in a molar ratio of 10:0 to 1:9, preferably 8:2 to 3:7, and more preferably of 7:3 to 5:5 and wherein the charge ratio of positive charges in DOTMA to negative charges in the RNA is 1.8:2 to 0.8:2, more preferably 1.6:2 to 1:2, even more preferably 1.4:2 to 1.1:2 and even more preferably about 1.2:2.

[0373] In some embodiments, the nanoparticles are lipoplexes comprising DOTMA and Cholesterol in a molar ratio of 10:0 to 1:9, preferably 8:2 to 3:7, and more preferably of 7:3 to 5:5 and wherein the charge ratio of positive charges in DOTMA to negative charges in the RNA is 1.8:2 to 0.8:2, more preferably 1.6:2 to 1:2, even more preferably 1.4:2 to 1.1:2 and even more preferably about 1.2:2. In some embodiments, the nanoparticles are lipoplexes comprising DOTAP and DOPE in a molar ratio of 10:0 to 1:9, preferably 8:2 to 3:7, and more preferably of 7:3 to 5:5 and wherein the charge ratio of positive charges in DOTMA to negative charges in the RNA is 1.8:2 to 0.8:2, more preferably 1.6:2 to 1:2, even more preferably 1.4:2 to 1.1:2 and even more preferably about 1.2:2. In some embodiments, the nanoparticles are lipoplexes comprising DOTMA and DOPE in a molar ratio of 2:1 to 1:2, preferably 2:1 to 1:1, and wherein the charge ratio of positive charges in DOTMA to negative charges in the RNA is 1.4:1 or less. In some embodiments, the nanoparticles are lipoplexes comprising DOTMA and cholesterol in a molar ratio of 2:1 to 1:2, preferably 2:1 to 1:1, and wherein the charge ratio of positive charges in DOTMA to negative charges in the RNA is 1.4:1 or less. In some embodiments, the nanoparticles are lipoplexes comprising DOTAP and DOPE in a molar ratio of 2:1 to 1:2, preferably 2:1 to 1:1, and wherein the charge ratio of positive charges in DOTAP to negative charges in the RNA is 1.4:1 or less. In some embodiments, the nanoparticles have an average diameter in the range of from about 50 nm to about 1000 nm, preferably from about 50 nm to about 400 nm, preferably about 100 nm to about 300 nm such as about 150 nm to about 200 nm. In some embodiments, the nanoparticles have a diameter in the range of about 200 to about 700 nm, about 200 to about 600 nm, preferably about 250 to about 550 nm, in particular about 300 to about 500 nm or about 200 to about 400 nm.

[0374] In some embodiments, the polydispersity index of the nanoparticles described herein as measured by dynamic light scattering is 0.5 or less, preferably 0.4 or less or even more preferably 0.3 or less. In some embodiments, the nanoparticles described herein are obtainable by one or more of the following: (i) incubation of liposomes in an aqueous phase with the RNA in an aqueous phase, (ii) incubation of the lipid dissolved in an organic, water miscible solvent, such as ethanol, with the RNA in aqueous solution, (iii) reverse phase evaporation technique, (iv) freezing and thawing of the product, (v) dehydration and rehydration of the product, (vi) lyophilization and rehydration of the of the product, or (vii) spray drying and rehydration of the product.

[0375] The nanoparticle formulation may comprise a polymer conjugate. The polymer conjugate may be a water-soluble conjugate. The polymer conjugate may have a structure as described in U.S. Publication No. 20130059360, the content of which is herein incorporated by reference in its entirety. In some aspects, polymer conjugates with the polynucleotides of the present invention may be made using the methods and/or segmented polymeric reagents described in U.S. Publication No. 20130072709, herein incorporated by reference in its entirety. In other aspects, the polymer conjugate may have pendant side groups comprising ring moieties such as, but not limited to, the polymer conjugates described in U.S. Publication No. US20130196948, the contents of which is herein incorporated by reference in its entirety.

[0376] The nanoparticle formulations may comprise a conjugate to enhance the delivery of nanoparticles of the present invention in a subject. Further, the conjugate may inhibit phagocytic clearance of the nanoparticles in a subject. In some aspects, the conjugate may be a “self” peptide designed from the human membrane protein CD47 (e.g., the “self” particles described by Rodriguez et al. (Science 2013, 339, 971-975), herein incorporated by reference in its entirety). As shown by Rodriguez et al., the self peptides delayed macrophage-mediated clearance of nanoparticles which enhanced delivery of the nanoparticles. In other aspects, the conjugate may be the membrane protein CD47 (e.g., see Rodriguez et al. Science 2013, 339, 971-975, herein incorporated by reference in its entirety). Rodriguez et al. showed that, similarly to “self” peptides, CD47 can increase the circulating particle ratio in a subject as compared to scrambled peptides and PEG coated nanoparticles.

[0377] In some embodiments, 100% of the uracil in the open reading frame have a chemical modification. In some embodiments, a chemical modification is in the 5-position of the uracil. In some embodiments, a chemical modification is a N1-methyl pseudouridine. In some embodiments, 100% of the uracil in the open reading frame have a N1-methyl pseudouridine in the 5-position of the uracil.

[0378] In some embodiments, efficacy of RNA vaccines RNA (e.g., mRNA) can be significantly enhanced when combined with a flagellin adjuvant, in particular, when one or more antigen-encoding mRNAs is combined with an mRNA encoding flagellin.

[0379] RNA (e.g., mRNA) vaccines combined with the flagellin adjuvant (e.g., mRNA-encoded flagellin adjuvant) have superior properties in that they may produce much larger antibody titers and produce responses earlier than commercially available vaccine formulations. While not wishing to be bound by theory, it is believed that the RNA vaccines, for example, as mRNA polynucleotides, are better designed to produce the appropriate protein conformation upon translation, for both the antigen and the adjuvant, as the RNA (e.g., mRNA) vaccines co-opt natural cellular machinery. Unlike traditional vaccines, which are manufactured ex vivo and may trigger unwanted cellular responses, RNA (e.g., mRNA) vaccines are presented to the cellular system in a more native fashion.

[0380] Some embodiments of the present disclosure provide RNA (e.g., mRNA) vaccines that include at least one RNA (e.g., mRNA) polynucleotide having an open reading frame encoding at least one antigenic polypeptide or an immunogenic fragment thereof (e.g., an immunogenic fragment capable of inducing an immune response to the antigenic polypeptide) and at least one RNA (e.g., mRNA polynucleotide) having an open reading frame encoding a flagellin adjuvant.

[0381] In some embodiments, at least one flagellin polypeptide (e.g., encoded flagellin polypeptide) is a flagellin protein. In some embodiments, at least one flagellin polypeptide (e.g., encoded flagellin polypeptide) is an immunogenic flagellin fragment. In some embodiments, at least one flagellin polypeptide and at least one antigenic polypeptide are encoded by a single RNA (e.g., mRNA) polynucleotide. In other embodiments, at least one flagellin polypeptide and at least one antigenic polypeptide are each encoded by a different RNA polynucleotide.

[0382] Some embodiments of the present disclosure provide methods of inducing an antigen specific immune response in a subject, comprising administering to the subject a SARS-CoV-2 vaccine in an amount effective to produce an antigen specific immune response.

[0383] In some aspects, vaccines of the invention (e.g., LNP-encapsulated mRNA vaccines) produce prophylactically- and/or therapeutically-efficacious levels, concentrations and/or titers of antigen-specific antibodies in the blood or serum of a vaccinated subject. As defined herein, the term antibody titer refers to the amount of antigen-specific antibody produces in s subject, e.g., a human subject. In exemplary embodiments, antibody titer is expressed as the inverse of the greatest dilution (in a serial dilution) that still gives a positive result. In exemplary embodiments, antibody titer is determined or measured by enzyme-linked immunosorbent assay (ELISA). In exemplary embodiments, antibody titer is determined or measured by neutralization assay, e.g., by microneutralization assay. In certain aspects, antibody titer measurement is expressed as a ratio, such as 1:40, 1:100, etc.

[0384] In exemplary embodiments of the invention, an efficacious vaccine produces an antibody titer of greater than 1:40, greater that 1:100, greater than 1:400, greater than 1:1000, greater than 1:2000, greater than 1:3000, greater than 1:4000, greater than 1:500, greater than 1:6000, greater than 1:7500, greater than 1:10000. In exemplary embodiments, the antibody titer is produced or reached by 10 days following vaccination, by 20 days following vaccination, by 30 days following vaccination, by 40 days following vaccination, or by 50 or more days following vaccination. In exemplary embodiments, the titer is produced or reached following a single dose of vaccine administered to the subject. In other embodiments, the titer is produced or reached following multiple doses, e.g., following a first and a second dose (e.g., a booster dose.)

[0385] In exemplary aspects of the invention, antigen-specific antibodies are measured in units of g/ml or are measured in units of IU/L (International Units per liter) or mIU/ml (milli International Units per ml). In exemplary embodiments of the invention, an efficacious vaccine produces >0.5 μg/ml, >0.1 μg/ml, >0.2 μg/ml, >0.35 μg/ml, >0.5 μg/ml, >1 μg/ml, >2 μg/ml, >5 μg/ml or >10 μg/ml. In exemplary embodiments of the invention, an efficacious vaccine produces >10 mIU/ml, >20 mIU/ml, >50 mIU/ml, >100 mIU/ml, >200 mIU/ml, >500 mIU/ml or >1000 mIU/ml. In exemplary embodiments, the antibody level or concentration is produced or reached by 10 days following vaccination, by 20 days following vaccination, by 30 days following vaccination, by 40 days following vaccination, or by 50 or more days following vaccination. In exemplary embodiments, the level or concentration is produced or reached following a single dose of vaccine administered to the subject. In other embodiments, the level or concentration is produced or reached following multiple doses, e.g., following a first and a second dose (e.g., a booster dose.) In exemplary embodiments, antibody level or concentration is determined or measured by enzyme-linked immunosorbent assay (ELISA). In exemplary embodiments, antibody level or concentration is determined or measured by neutralization assay, e.g., by microneutralization assay.

[0386] In some embodiments, the SARS-CoV-2 vaccine includes at least one RNA polynucleotide having an open reading frame encoding at least one SARS-CoV-2 antigenic polypeptide having at least one modification, at least one 5′ terminal cap, and is formulated within a lipid nanoparticle. 5′-capping of polynucleotides may be completed concomitantly during the in vitro-transcription reaction using the following chemical RNA cap analogs to generate the 5′-guanosine cap structure according to manufacturer protocols: 3′-O-Me-m7G(5′)ppp(5′) G [the ARCA cap]; G(5′)ppp(5′)A; G(5′)ppp(5′)G; m7G(5′)ppp(5′)A; m7G(5′)ppp(5′)G (New England BioLabs, Ipswich, Mass.). 5′-capping of modified RNA may be completed post-transcriptionally using a Vaccinia Virus Capping Enzyme to generate the “Cap 0” structure: m7G(5′)ppp(5′)G (New England BioLabs, Ipswich, Mass.). Cap 1 structure may be generated using both Vaccinia Virus Capping Enzyme and a 2′-O methyl-transferase to generate m7G(5′)ppp(5′)G-2′-O-methyl. Cap 2 structure may be generated from the Cap 1 structure followed by the 2′-O-methylation of the 5′-antepenultimate nucleotide using a 2′-O methyl-transferase. Cap 3 structure may be generated from the Cap 2 structure followed by the 2′-O-methylation of the 5′-preantepenultimate nucleotide using a 2′-O methyl-transferase. Enzymes are preferably derived from a recombinant source. When transfected into mammalian cells, the modified mRNAs have a stability of from about 12 to about 18 hours or more than about 18 hours, e.g., 24, 36, 48, 60, 72, or greater than about 72 hours.

[0387] In some embodiments, a codon optimized RNA may, for instance, be one in which the levels of G/C are enhanced. The G/C-content of nucleic acid molecules may influence the stability of the RNA. RNA having an increased amount of guanine (G) and/or cytosine (C) residues may be functionally more stable than nucleic acids containing a large amount of adenine (A) and thymine (T) or uracil (U) nucleotides. WO02/098443 discloses a pharmaceutical composition containing an mRNA stabilized by sequence modifications in the translated region. Due to the degeneracy of the genetic code, the modifications work by substituting existing codons for those that promote greater RNA stability without changing the resulting amino acid. The approach is limited to coding regions of the RNA.

[0388] In some embodiments, polynucleotides (e.g., RNA polynucleotides, such as mRNA polynucleotides) include a combination of at least two (e.g., 2, 3, 4 or more) of the aforementioned modified nucleobases.

[0389] In some embodiments, modified nucleobases in polynucleotides (e.g., RNA polynucleotides, such as mRNA polynucleotides) are selected from the group consisting of pseudouridine (ψ), 2-thiouridine (s2U), 4′-thiouridine, 5-methylcytosine, 2-thio-1-methyl-1-deaza-pseudouridine, 2-thio-1-methyl-pseudouridine, 2-thio-5-aza-uridine, 2-thio-dihydropseudouridine, 2-thio-dihydrouridine, 2-thio-pseudouridine, 4-methoxy-2-thio-pseudouridine, 4-methoxy-pseudouridine, 4-thio-1-methyl-pseudouridine, 4-thio-pseudouridine, 5-aza-uridine, dihydropseudouridine, 5-methyluridine, 5-methoxyuridine, 2′-O-methyl uridine, 1-methyl-pseudouridine (m1ψ), 1-ethyl-pseudouridine (e1ψ), 5-methoxyuridine (mo5U), 5-methyl-cytidine (m5C), α-thio-guanosine, α-thio-adenosine, 5-cyano uridine, 4′-thio uridine 7-deaza-adenine, 1-methyl-adenosine (m1A), 2-methyl-adenine (m2A), N6-methyl-adenosine (m6A), and 2,6-Diaminopurine, (I), 1-methyl-inosine (m1I), wyosine (imG), methylwyosine (mimG), 7-deaza-guanosine, 7-cyano-7-deaza-guanosine (preQ0), 7-aminomethyl-7-deaza-guanosine (preQ1), 7-methyl-guanosine (m7G), 1-methyl-guanosine (mlG), 8-oxo-guanosine, 7-methyl-8-oxo-guanosine, 2,8-dimethyladenosine, 2-geranylthiouridine, 2-lysidine, 2-selenouridine, 3-(3-amino-3-carboxypropyl)-5,6-dihydrouridine, 3-(3-amino-3-carboxypropyl)pseudouridine, 3-methylpseudouridine, 5-(carboxyhydroxymethyl)-2′-O-methyluridine methyl ester, 5-aminomethyl-2-geranylthiouridine, 5-aminomethyl-2-selenouridine, 5-aminomethyluridine, 5-carbamoylhydroxymethyluridine, 5-carbamoylmethyl-2-thiouridine, 5-carboxymethyl-2-thiouridine, 5-carboxymethylaminomethyl-2-geranylthiouridine, 5-carboxymethylaminomethyl-2-selenouridine, 5-cyanomethyluridine, 5-hydroxycytidine, 5-methylaminomethyl-2-geranylthiouridine, 7-aminocarboxypropyl-demethylwyosine, 7-aminocarboxypropylwyosine, 7-aminocarboxypropylwyosine methyl ester, 8-methyladenosine, N4,N4-dimethylcytidine, N6-formyladenosine, N6-hydroxymethyladenosine, agmatidine, cyclic N6-threonylcarbamoyladenosine, glutamyl-queuosine, methylated undermodified hydroxywybutosine, N4,N4,2′-O-trimethylcytidine, geranylated 5-methylaminomethyl-2-thiouridine, geranylated 5-carboxymethylaminomethyl-2-thiouridine, Qbase, preQ0base, preQ1base, and combinations of two or more thereof. In some embodiments, the at least one chemically modified nucleoside is selected from the group consisting of pseudouridine, 1-methyl-pseudouridine, 1-ethyl-pseudouridine, 5-methylcytosine, 5-methoxyuridine, and a combination thereof. In some embodiments, the polyribonucleotide (e.g., RNA polyribonucleotide, such as mRNA polyribonucleotide) includes a combination of at least two (e.g., 2, 3, 4 or more) of the aforementioned modified nucleobases. In some embodiments, polynucleotides (e.g., RNA polynucleotides, such as mRNA polynucleotides) include a combination of at least two (e.g., 2, 3, 4 or more) of the aforementioned modified nucleobases.

[0390] The expressible nucleic acid sequence of the present disclosure may be partially or fully modified along the entire length of the molecule. For example, one or more or all or a given type of nucleotide (e.g., purine or pyrimidine, or any one or more or all of A, G, U, C) may be uniformly modified in a polynucleotide of the invention, or in a given predetermined sequence region thereof (e.g., in the mRNA including or excluding the polyA tail). In some embodiments, all nucleotides X in a polynucleotide of the present disclosure (or in a given sequence region thereof) are modified nucleotides, wherein X may be any one of nucleotides A, G, U, C, or any one of the combinations A+G, A+U, A+C, G+U, G+C, U+C, A+G+U, A+G+C, G+U+C, or A+G+C.

[0391] The polynucleotide may contain from about 1% to about 100% modified nucleotides (either in relation to overall nucleotide content, or in relation to one or more types of nucleotide, i.e., any one or more of A, G, U or C) or any intervening percentage (e.g., from 1% to 20%, from 1% to 25%, from 1% to 50%, from about 1% to about 60%, from 1% to 70%, from 1% to 80%, from 1% to 90%, from 1% to 95%, from 10% to 20%, from 10% to 25%, from 10% to 50%, from 10% to 60%, from 10% to 70%, from 10% to 80%, from 10% to 90%, from 10% to 95%, from 10% to 100%, from 20% to 25%, from 20% to 50%, from 20% to 60%, from 20% to 70%, from 20% to 80%, from 20% to 90%, from 20% to 95%, from 20% to 100%, from 50% to 60%, from 50% to 70%, from 50% to 80%, from 50% to 90%, from 50% to 95%, from 50% to 100%, from 70% to 80%, from 70% to 90%, from 70% to 95%, from 70% to 100%, from 80% to 90%, from 80% to 95%, from 80% to 100%, from 90% to 95%, from 90% to 100%, and from 95% to 100%). It will be understood that any remaining percentage is accounted for by the presence of unmodified A, G, U, or C.

[0392] The nucleic acid sequences may contain at a minimum 1% and at maximum 100% modified nucleotides, or any intervening percentage, such as at least 5% modified nucleotides, at least 10% modified nucleotides, at least 25% modified nucleotides, at least 50% modified nucleotides, at least 80% modified nucleotides, or at least 90% modified nucleotides. For example, the polynucleotides may contain a modified pyrimidine such as a modified uracil or cytosine. In some embodiments, at least 5%, at least 10%, at least 25%, at least 50%, at least 80%, at least 90% or 100% of the uracil in the polynucleotide is replaced with a modified uracil (e.g., a 5-substituted uracil). The modified uracil can be replaced by a compound having a single unique structure, or can be replaced by a plurality of compounds having different structures (e.g., 2, 3, 4, or more unique structures). In some embodiments, at least 5%, at least 10%, at least 25%, at least 50%, at least 80%, at least 90%, or 100% of the cytosine in the polynucleotide is replaced with a modified cytosine (e.g., a 5-substituted cytosine). The modified cytosine can be replaced by a compound having a single unique structure, or can be replaced by a plurality of compounds having different structures (e.g., 2, 3, 4, or more unique structures).

[0393] Thus, in some embodiments, the RNA vaccines and/or RNA nucleic acid sequences comprise a 5′UTR element, an optionally codon optimized open reading frame, and a 3′UTR element, a poly(A) sequence and/or a polyadenylation signal wherein the RNA is not chemically modified.

[0394] Viral vaccines of the present disclosure comprise at least one RNA polynucleotide, such as a mRNA (e.g., modified mRNA). mRNA, for example, is transcribed in vitro from template DNA, referred to as an “in vitro transcription template.” In some embodiments, the at least one RNA polynucleotide has at least one chemical modification. The at least one chemical modification may include, but is expressly not limited to, any modification described herein.

[0395] In vitro transcription of RNA is known in the art and is described in WO/2014/152027, which is incorporated by reference herein in its entirety. For example, in some embodiments, the RNA transcript is generated using a non-amplified, linearized DNA template in an in vitro transcription reaction to generate the RNA transcript. In some embodiments, the RNA transcript is capped via enzymatic capping. In some embodiments, the RNA transcript is purified via chromatographic methods, e.g., use of an oligo dT substrate. Some embodiments exclude the use of DNase. In some embodiments, the RNA transcript is synthesized from a non-amplified, linear DNA template coding for the gene of interest via an enzymatic in vitro transcription reaction utilizing a T7 phage RNA polymerase and nucleotide triphosphates of the desired chemistry. Any number of RNA polymerases or variants may be used in the method of the present invention. The polymerase may be selected from, but is not limited to, a phage RNA polymerase, e.g., a T7 RNA polymerase, a T3 RNA polymerase, a SP6 RNa polymerase, and/or mutant polymerases such as, but not limited to, polymerases able to incorporate modified nucleic acids and/or modified nucleotides, including chemically modified nucleic acids and/or nucleotides.

[0396] In some embodiments, anon-amplified, linearized plasmid DNA is utilized as the template DNA for in vitro transcription. In some embodiments, the template DNA is isolated DNA. In some embodiments, the template DNA is cDNA. In some embodiments, the cDNA is formed by reverse transcription of a RNA polynucleotide, for example, but not limited to SARS-CoV-2 RNA, e.g. SARS-CoV-2 mRNA. In some embodiments, cells, e.g., bacterial cells, e.g., E. coli, e.g., DH-1 cells are transfected with the plasmid DNA template. In some embodiments, the transfected cells are cultured to replicate the plasmid DNA which is then isolated and purified. In some embodiments, the DNA template includes a RNA polymerase promoter, e.g., a T7 promoter located 5′ to and operably linked to the gene of interest.

### F. Vaccines

[0397] Disclosed are DNA vaccines comprising at least about 70%, 75%, 80%, 85%, 90%, 91%, 92%, 93%, 94%, 95%, 96%, 97%, 98%, 99% or 100% sequence identity to SEQ ID NO: 68, SEQ ID NO: 71, SEQ ID NO: 74, SEQ ID NO: 77, SEQ ID NO: 80, SEQ ID NO: 83, SEQ ID NO: 86, SEQ ID NO: 89, SEQ ID NO: 92, SEQ ID NO: 95, SEQ ID NO: 98, SEQ ID NO: 101, SEQ ID NO: 104, SEQ ID NO: 107, SEQ ID NO: 110, SEQ ID NO: 113, SEQ ID NO: 116, SEQ ID NO: 119, SEQ ID NO: 122, SEQ ID NO: 125, SEQ ID NO: 128, SEQ ID NO: 131, SEQ ID NO: 134, SEQ ID NO: 137, SEQ ID NO: 140, SEQ ID NO: 143, SEQ ID NO: 146, SEQ ID NO: 149, SEQ ID NO: 152, SEQ ID NO: 155 or SEQ ID NO: 158, or a functional fragment or variant thereof. Also disclosed are RNA vaccines comprising at least about 70%, 75%, 80%, 85%, 90%, 91%, 92%, 93%, 94%, 95%, 96%, 97%, 98%, 99% or 100% sequence identity to SEQ ID NO: 69, SEQ ID NO: 72, SEQ ID NO: 75, SEQ ID NO: 78, SEQ ID NO: 81, SEQ ID NO: 84, SEQ ID NO: 87, SEQ ID NO: 90, SEQ ID NO: 93, SEQ ID NO: 96, SEQ ID NO: 99, SEQ ID NO: 102, SEQ ID NO: 105, SEQ ID NO: 108, SEQ ID NO: 111, SEQ ID NO: 114, SEQ ID NO: 117, SEQ ID NO: 120, SEQ ID NO: 123, SEQ ID NO: 126, SEQ ID NO: 129, SEQ ID NO: 132, SEQ ID NO: 135, SEQ ID NO: 138, SEQ ID NO: 141, SEQ ID NO: 144, SEQ ID NO: 147, SEQ ID NO: 150, SEQ ID NO: 153, SEQ ID NO: 156 or SEQ ID NO: 159, or a functional fragment or variant thereof. In some embodiment, the DNA or RNA vaccine disclosed herein encodes a polypeptide comprising at least about 70%, 75%, 80%, 85%, 90%, 91%, 92%, 93%, 94%, 95%, 96%, 97%, 98%, 99% or 100% sequence identity to SEQ ID NO: 70, SEQ ID NO: 73, SEQ ID NO: 76, SEQ ID NO: 79, SEQ ID NO: 82, SEQ ID NO: 85, SEQ ID NO: 88, SEQ ID NO: 91, SEQ ID NO: 94, SEQ ID NO: 97, SEQ ID NO: 100, SEQ ID NO: 103, SEQ ID NO: 106, SEQ ID NO: 109, SEQ ID NO: 112, SEQ ID NO: 115, SEQ ID NO: 118, SEQ ID NO: 121, SEQ ID NO: 124, SEQ ID NO: 127, SEQ ID NO: 130, SEQ ID NO: 133, SEQ ID NO: 136, SEQ ID NO: 139, SEQ ID NO: 142, SEQ ID NO: 145, SEQ ID NO: 148, SEQ ID NO: 151, SEQ ID NO: 154, SEQ ID NO: 157 or SEQ ID NO: 160, or a functional fragment or variant thereof. In some embodiments, the disclosed DNA vaccine further comprises a pharmaceutically acceptable excipient. In some embodiments, the pharmaceutically acceptable excipient is an adjuvant.

### G. Kits

[0398] The materials described above as well as other materials can be packaged together in any suitable combination as a kit useful for performing, or aiding in the performance of, the disclosed method. It is useful if the kit components in a given kit are designed and adapted for use together in the disclosed method. For example disclosed are kits comprising any of the elements of the disclosed nucleic acid compositions. For example, disclosed are kits comprising nucleic acid sequences comprising a leader sequence, a linker sequence, a nucleic acid sequence encoding a self-assembling polypeptide, and/or a nucleic acid sequence encoding a viral antigen. In some embodiments, the kits can further comprise a plasmid backbone.

[0399] Vaccine constructs in accordance with the present disclosure are provided below and may comprise contiguously or non-contiguously a nucleic acid that encodes the following protein sequences:

Key:
IgE leader sequence- LS3-Epitope- linker (contiguous)
1. LS3_SARS-COV Spike
MDWTWILFLVAAATRVHS (IgE leader)
LRFGIVASRANHALV (LS-3 epitope)
GGSGGSGGSGGSGGG (linker)
MFIFLLFLTLTSGSDLDRCTTFDDVQAPNYTQHTSSMRGVYYPDEIFRSDTLYLTQDL
FLPFYSNVTGFHTINHTFGNPVIPFKDGIYFAATEKSNVVRGWVFGSTMNNKSQSVIII
NNSTNVVIRACNFELCDNPFFAVSKPMGTQTHTMIFDNAFNCTFEYISDAFSLDVSEK
SGNFKHLREFVFKNKDGFLYVYKGYQPIDVVRDLPSGFNTLKPIFKLPLGINITNFRAI
LTAFSPAQDIWGTSAAAYFVGYLKPTTFMLKYDENGTITDAVDCSQNPLAELKCSVK
SFEIDKGIYQTSNFRVVPSGDVVRFPNITNLCPFGEVFNATKFPSVYAWERKKISNCV
ADYSVLYNSTFFSTFKCYGVSATKLNDLCFSNVYADSFVVKGDDVRQIAPGQTGVIA
DYNYKLPDDFMGCVLAWNTRNIDATSTGNYNYKYRYLRHGKLRPFERDISNVPFSP
DGKPCTPPALNCYWPLNDYGFYTTTGIGYQPYRVVVLSFELLNAPATVCGPKLSTDL
IKNQCVNFNFNGLTGTGVLTPSSKRFQPFQQFGRDVSDFTDSVRDPKTSEILDISPCSF
GGVSVITPGTNASSEVAVLYQDVNCTDVSTAIHADQLTPAWRIYSTGNNVFQTQAGC
LIGAEHVDTSYECDIPIGAGICASYHTVSLLRSTSQKSIVAYTMSLGADSSIAYSNNTIA
IPTNFSISITTEVMPVSMAKTSVDCNMYICGDSTECANLLLQYGSFCTQLNRALSGIAA
EQDRNTREVFAQVKQMYKTPTLKYFGGFNFSQILPDPLKPTKRSFIEDLLFNKVTLAD
AGFMKQYGECLGDINARDLICAQKFNGLTVLPPLLTDDMIAAYTAALVSGTATAGW
TFGAGAALQIPFAMQMAYRFNGIGVTQNVLYENQKQIANQFNKAISQIQESLTTTST
ALGKLQDVVNQNAQALNTLVKQLSSNFGAISSVLNDILSRLDKVEAEVQIDRLITGRL
QSLQTYVTQQLIRAAEIRASANLAATKMSECVLGQSKRVDFCGKGYHLMSFPQAAP
HGVVFLHVTYVPSQERNFTTAPAICHEGKAYFPREGVFVFNGTSWFITQRNFFSPQIIT
TDNTFVSGNCDVVIGIINNTVYDPLQPELDSFKEELDKYFKNHTSPDVDLGDISGINAS
VVNIQKEIDRLNEVAKNLNESLIDLQELGKYEQYIKWPWYVWLGFIAGLIAIVMVTIL
LCCMTSCCSCLKGACSCGSCCKFDEDDSEPVLKGVKLHYT
DNA sequence (each plus identifies a subpart of th enucleica cid seqeunce;
yet seqeunce below is contiguous)
ATGGACTGGACCTGGATCCTGTTCCTGGTGGCCGCCGCCACCAGGGTGCACAGC +
CTGAGGTTCGGCATCGTGGCCAGCAGGGCCAACCACGCCCTGGTG +
GGCGGCAGCGGCGGCAGCGGCGGCAGCGGCGGCAGCGGCGGCGGC +
ATGTTCATCTTCCTGCTGTTCCTGACCCTGACCAGCGGCAGCGACCTGGACAGGTGCACCACCTTCGACGACGTGCAGG
CCCCCAACTACACCCAGCACACCAGCAGCATGAGGGGCGTGTACTACCCCGACGAGATCTTCAGGAGCGACACCCTGTA
CCTGACCCAGGACCTGTTCCTGCCCTTCTACAGCAACGTGACCGGCTTCCACACCATCAACCACACCTTCGGCAACCCC
GTGATCCCCTTCAAGGACGGCATCTACTTCGCCGCCACCGAGAAGAGCAACGTGGTGAGGGGCTGGGTGTTCGGCAGCA
CCATGAACAACAAGAGCCAGAGCGTGATCATCATCAACAACAGCACCAACGTGGTGATCAGGGCCTGCAACTTCGAGCT
GTGCGACAACCCCTTCTTCGCCGTGAGCAAGCCCATGGGCACCCAGACCCACACCATGATCTTCGACAACGCCTTCAAC
TGCACCTTCGAGTACATCAGCGACGCCTTCAGCCTGGACGTGAGCGAGAAGAGCGGCAACTTCAAGCACCTGAGGGAGT
TCGTGTTCAAGAACAAGGACGGCTTCCTGTACGTGTACAAGGGCTACCAGCCCATCGACGTGGTGAGGGACCTGCCCAG
CGGCTTCAACACCCTGAAGCCCATCTTCAAGCTGCCCCTGGGCATCAACATCACCAACTTCAGGGCCATCCTGACCGCC
TTCAGCCCCGCCCAGGACATCTGGGGCACCAGCGCCGCCGCCTACTTCGTGGGCTACCTGAAGCCCACCACCTTCATGC
TGAAGTACGACGAGAACGGCACCATCACCGACGCCGTGGACTGCAGCCAGAACCCCCTGGCCGAGCTGAAGTGCAGCGT
GAAGAGCTTCGAGATCGACAAGGGCATCTACCAGACCAGCAACTTCAGGGTGGTGCCCAGCGGCGACGTGGTGAGGTTC
CCCAACATCACCAACCTGTGCCCCTTCGGCGAGGTGTTCAACGCCACCAAGTTCCCCAGCGTGTACGCCTGGGAGAGGA
AGAAGATCAGCAACTGCGTGGCCGACTACAGCGTGCTGTACAACAGCACCTTCTTCAGCACCTTCAAGTGCTACGGCGT
GAGCGCCACCAAGCTGAACGACCTGTGCTTCAGCAACGTGTACGCCGACAGCTTCGTGGTGAAGGGCGACGACGTGAGG
CAGATCGCCCCCGGCCAGACCGGCGTGATCGCCGACTACAACTACAAGCTGCCCGACGACTTCATGGGCTGCGTGCTGG
CCTGGAACACCAGGAACATCGACGCCACCAGCACCGGCAACTACAACTACAAGTACAGGTACCTGAGGCACGGCAAGCT
GAGGCCCTTCGAGAGGGACATCAGCAACGTGCCCTTCAGCCCCGACGGCAAGCCCTGCACCCCCCCCGCCCTGAACTGC
TACTGGCCCCTGAACGACTACGGCTTCTACACCACCACCGGCATCGGCTACCAGCCCTACAGGGTGGTGGTGCTGAGCT
TCGAGCTGCTGAACGCCCCCGCCACCGTGTGCGGCCCCAAGCTGAGCACCGACCTGATCAAGAACCAGTGCGTGAACTT
CAACTTCAACGGCCTGACCGGCACCGGCGTGCTGACCCCCAGCAGCAAGAGGTTCCAGCCCTTCCAGCAGTTCGGCAGG
GACGTGAGCGACTTCACCGACAGCGTGAGGGACCCCAAGACCAGCGAGATCCTGGACATCAGCCCCTGCAGCTTCGGCG
GCGTGAGCGTGATCACCCCCGGCACCAACGCCAGCAGCGAGGTGGCCGTGCTGTACCAGGACGTGAACTGCACCGACGT
GAGCACCGCCATCCACGCCGACCAGCTGACCCCCGCCTGGAGGATCTACAGCACCGGCAACAACGTGTTCCAGACCCAG
GCCGGCTGCCTGATCGGCGCCGAGCACGTGGACACCAGCTACGAGTGCGACATCCCCATCGGCGCCGGCATCTGCGCCA
GCTACCACACCGTGAGCCTGCTGAGGAGCACCAGCCAGAAGAGCATCGTGGCCTACACCATGAGCCTGGGCGCCGACAG
CAGCATCGCCTACAGCAACAACACCATCGCCATCCCCACCAACTTCAGCATCAGCATCACCACCGAGGTGATGCCCGTG
AGCATGGCCAAGACCAGCGTGGACTGCAACATGTACATCTGCGGCGACAGCACCGAGTGCGCCAACCTGCTGCTGCAGT
ACGGCAGCTTCTGCACCCAGCTGAACAGGGCCCTGAGCGGCATCGCCGCCGAGCAGGACAGGAACACCAGGGAGGTGTT
CGCCCAGGTGAAGCAGATGTACAAGACCCCCACCCTGAAGTACTTCGGCGGCTTCAACTTCAGCCAGATCCTGCCCGAC
CCCCTGAAGCCCACCAAGAGGAGCTTCATCGAGGACCTGCTGTTCAACAAGGTGACCCTGGCCGACGCCGGCTTCATGA
AGCAGTACGGCGAGTGCCTGGGCGACATCAACGCCAGGGACCTGATCTGCGCCCAGAAGTTCAACGGCCTGACCGTGCT
GCCCCCCCTGCTGACCGACGACATGATCGCCGCCTACACCGCCGCCCTGGTGAGCGGCACCGCCACCGCCGGCTGGACC
TTCGGCGCCGGCGCCGCCCTGCAGATCCCCTTCGCCATGCAGATGGCCTACAGGTTCAACGGCATCGGCGTGACCCAGA
ACGTGCTGTACGAGAACCAGAAGCAGATCGCCAACCAGTTCAACAAGGCCATCAGCCAGATCCAGGAGAGCCTGACCAC
CACCAGCACCGCCCTGGGCAAGCTGCAGGACGTGGTGAACCAGAACGCCCAGGCCCTGAACACCCTGGTGAAGCAGCTG
AGCAGCAACTTCGGCGCCATCAGCAGCGTGCTGAACGACATCCTGAGCAGGCTGGACAAGGTGGAGGCCGAGGTGCAGA
TCGACAGGCTGATCACCGGCAGGCTGCAGAGCCTGCAGACCTACGTGACCCAGCAGCTGATCAGGGCCGCCGAGATCAG
GGCCAGCGCCAACCTGGCCGCCACCAAGATGAGCGAGTGCGTGCTGGGCCAGAGCAAGAGGGTGGACTTCTGCGGCAAG
GGCTACCACCTGATGAGCTTCCCCCAGGCCGCCCCCCACGGCGTGGTGTTCCTGCACGTGACCTACGTGCCCAGCCAGG
AGAGGAACTTCACCACCGCCCCCGCCATCTGCCACGAGGGCAAGGCCTACTTCCCCAGGGAGGGCGTGTTCGTGTTCAA
CGGCACCAGCTGGTTCATCACCCAGAGGAACTTCTTCAGCCCCCAGATCATCACCACCGACAACACCTTCGTGAGCGGC
AACTGCGACGTGGTGATCGGCATCATCAACAACACCGTGTACGACCCCCTGCAGCCCGAGCTGGACAGCTTCAAGGAGG
AGCTGGACAAGTACTTCAAGAACCACACCAGCCCCGACGTGGACCTGGGCGACATCAGCGGCATCAACGCCAGCGTGGT
GAACATCCAGAAGGAGATCGACAGGCTGAACGAGGTGGCCAAGAACCTGAACGAGAGCCTGATCGACCTGCAGGAGCTG
GGCAAGTACGAGCAGTACATCAAGTGGCCCTGGTACGTGTGGCTGGGCTTCATCGCCGGCCTGATCGCCATCGTGATGG
TGACCATCCTGCTGTGCTGCATGACCAGCTGCTGCAGCTGCCTGAAGGGCGCCTGCAGCTGCGGCAGCTGCTGCAAGTT
CGACGAGGACGACAGCGAGCCCGTGCTGAAGGGCGTGAAGCTGCACTACACC
2. LS3_SARS-COV2 Spike
MDWTWILFLVAAATRVHSLRFGIVASRANHALVGGSGGSGGSGGSGGGMFVFLVLLPLV
SSQCVNLTTRTQLPPAYTNSFTRGVYYPDKVFRSSVLHSTQDLFLPFFSNVTWFHAIH
VSGTNGTKRFDNPVLPFNDGVYFASTEKSNIIRGWIFGTTLDSKTQSLLIVNNATNVVI
KVCEFQFCNDPFLGVYYHKNNKSWMESEFRVYSSANNCTFEYVSQPFLMDLEGKQG
NFKNLREFVFKNIDGYFKIYSKHTPINLVRDLPQGFSALEPLVDLPIGINITRFQTLLAL
HRSYLTPGDSSSGWTAGAAAYYVGYLQPRTFLLKYNENGTITDAVDCALDPLSETK
CTLKSFTVEKGIYQTSNFRVQPTESIVRFPNITNLCPFGEVFNATRFASVYAWNRKRIS
NCVADYSVLYNSASFSTFKCYGVSPTKLNDLCFTNVYADSFVIRGDEVRQIAPGQTG
KIADYNYKLPDDFTGCVIAWNSNNLDSKVGGNYNYLYRLFRKSNLKPFERDISTEIY
QAGSTPCNGVEGFNCYFPLQSYGFQPTNGVGYQPYRVVVLSFELLHAPATVCGPKKS
TNLVKNKCVNFNFNGLTGTGVLTESNKKFLPFQQFGRDIADTTDAVRDPQTLEILDIT
PCSFGGVSVITPGTNTSNQVAVLYQDVNCTEVPVAIHADQLTPTWRVYSTGSNVFQT
RAGCLIGAEHVNNSYECDIPIGAGICASYQTQTNSPRRARSVASQSIIAYTMSLGAENS
VAYSNNSIAIPTNFTISVTTEILPVSMTKTSVDCTMYICGDSTECSNLLLQYGSFCTQL
NRALTGIAVEQDKNTQEVFAQVKQIYKTPPIKDFGGFNFSQILPDPSKPSKRSFIEDLL
FNKVTLADAGFIKQYGDCLGDIAARDLICAQKFNGLTVLPPLLTDEMIAQYTSALLA
GTITSGWTFGAGAALQIPFAMQMAYRFNGIGVTQNVLYENQKLIANQFNSAIGKIQD
SLSSTASALGKLQDVVNQNAQALNTLVKQLSSNFGAISSVLNDILSRLDKVEAEVQID
RLITGRLQSLQTYVTQQLIRAAEIRASANLAATKMSECVLGQSKRVDFCGKGYHLMS
FPQSAPHGVVFLHVTYVPAQEKNFTTAPAICHDGKAHFPREGVFVSNGTHWFVTQR
NFYEPQUITTDNTFVSGNCDVVIGIVNNTVYDPLQPELDSFKEELDKYFKNHTSPDVD
LGDISGINASVVNIQKEIDRLNEVAKNLNESLIDLQELGKYEQYIKWPWYIWLGFIAG
LIAIVMVTIMLCCMTSCCSCLKGCCSCGSCCKFDEDDSEPVLKGVKLHYT
DNA sequence
ATGGACTGGACCTGGATCCTGTTCCTGGTGGCCGCCGCCACCAGGGTGCACAGCCTGAGGTTCGGCATCGTGGCCAGCA
GGGCCAACCACGCCCTGGTGGGCGGCAGCGGCGGCAGCGGCGGCAGCGGCGGCAGCGGCGGCGGCATGTTCGTG
TTCCTGGTGCTGCTGCCCCTGGTGAGCAGCCAGTGCGTGAACCTGACCACCAGGACCCAGCTGCCCCCC
GCCTACACCAACAGCTTCACCAGGGGCGTGTACTACCCCGACAAGGTGTTCAGGAGCAGCGTGCTGCAC
AGCACCCAGGACCTGTTCCTGCCCTTCTTCAGCAACGTGACCTGGTTCCACGCCATCCACGTGAGCGGCA
CCAACGGCACCAAGAGGTTCGACAACCCCGTGCTGCCCTTCAACGACGGCGTGTACTTCGCCAGCACCG
AGAAGAGCAACATCATCAGGGGCTGGATCTTCGGCACCACCCTGGACAGCAAGACCCAGAGCCTGCTG
ATCGTGAACAACGCCACCAACGTGGTGATCAAGGTGTGCGAGTTCCAGTTCTGCAACGACCCCTTCCTG
GGCGTGTACTACCACAAGAACAACAAGAGCTGGATGGAGAGCGAGTTCAGGGTGTACAGCAGCGCCAA
CAACTGCACCTTCGAGTACGTGAGCCAGCCCTTCCTGATGGACCTGGAGGGCAAGCAGGGCAACTTCAA
GAACCTGAGGGAGTTCGTGTTCAAGAACATCGACGGCTACTTCAAGATCTACAGCAAGCACACCCCCAT
CAACCTGGTGAGGGACCTGCCCCAGGGCTTCAGCGCCCTGGAGCCCCTGGTGGACCTGCCCATCGGCAT
CAACATCACCAGGTTCCAGACCCTGCTGGCCCTGCACAGGAGCTACCTGACCCCCGGCGACAGCAGCAG
CGGCTGGACCGCCGGCGCCGCCGCCTACTACGTGGGCTACCTGCAGCCCAGGACCTTCCTGCTGAAGTA
CAACGAGAACGGCACCATCACCGACGCCGTGGACTGCGCCCTGGACCCCCTGAGCGAGACCAAGTGCA
CCCTGAAGAGCTTCACCGTGGAGAAGGGCATCTACCAGACCAGCAACTTCAGGGTGCAGCCCACCGAG
AGCATCGTGAGGTTCCCCAACATCACCAACCTGTGCCCCTTCGGCGAGGTGTTCAACGCCACCAGGTTC
GCCAGCGTGTACGCCTGGAACAGGAAGAGGATCAGCAACTGCGTGGCCGACTACAGCGTGCTGTACAA
CAGCGCCAGCTTCAGCACCTTCAAGTGCTACGGCGTGAGCCCCACCAAGCTGAACGACCTGTGCTTCAC
CAACGTGTACGCCGACAGCTTCGTGATCAGGGGCGACGAGGTGAGGCAGATCGCCCCCGGCCAGACCG
GCAAGATCGCCGACTACAACTACAAGCTGCCCGACGACTTCACCGGCTGCGTGATCGCCTGGAACAGCA
ACAACCTGGACAGCAAGGTGGGCGGCAACTACAACTACCTGTACAGGCTGTTCAGGAAGAGCAACCTG
AAGCCCTTCGAGAGGGACATCAGCACCGAGATCTACCAGGCCGGCAGCACCCCCTGCAACGGCGTGGA
GGGCTTCAACTGCTACTTCCCCCTGCAGAGCTACGGCTTCCAGCCCACCAACGGCGTGGGCTACCAGCC
CTACAGGGTGGTGGTGCTGAGCTTCGAGCTGCTGCACGCCCCCGCCACCGTGTGCGGCCCCAAGAAGAG
CACCAACCTGGTGAAGAACAAGTGCGTGAACTTCAACTTCAACGGCCTGACCGGCACCGGCGTGCTGAC
CGAGAGCAACAAGAAGTTCCTGCCCTTCCAGCAGTTCGGCAGGGACATCGCCGACACCACCGACGCCGT
GAGGGACCCCCAGACCCTGGAGATCCTGGACATCACCCCCTGCAGCTTCGGCGGCGTGAGCGTGATCAC
CCCCGGCACCAACACCAGCAACCAGGTGGCCGTGCTGTACCAGGACGTGAACTGCACCGAGGTGCCCGT
GGCCATCCACGCCGACCAGCTGACCCCCACCTGGAGGGTGTACAGCACCGGCAGCAACGTGTTCCAGAC
CAGGGCCGGCTGCCTGATCGGCGCCGAGCACGTGAACAACAGCTACGAGTGCGACATCCCCATCGGCG
CCGGCATCTGCGCCAGCTACCAGACCCAGACCAACAGCCCCAGGAGGGCCAGGAGCGTGGCCAGCCAG
AGCATCATCGCCTACACCATGAGCCTGGGCGCCGAGAACAGCGTGGCCTACAGCAACAACAGCATCGC
CATCCCCACCAACTTCACCATCAGCGTGACCACCGAGATCCTGCCCGTGAGCATGACCAAGACCAGCGT
GGACTGCACCATGTACATCTGCGGCGACAGCACCGAGTGCAGCAACCTGCTGCTGCAGTACGGCAGCTT
CTGCACCCAGCTGAACAGGGCCCTGACCGGCATCGCCGTGGAGCAGGACAAGAACACCCAGGAGGTGT
TCGCCCAGGTGAAGCAGATCTACAAGACCCCCCCCATCAAGGACTTCGGCGGCTTCAACTTCAGCCAGA
TCCTGCCCGACCCCAGCAAGCCCAGCAAGAGGAGCTTCATCGAGGACCTGCTGTTCAACAAGGTGACCC
TGGCCGACGCCGGCTTCATCAAGCAGTACGGCGACTGCCTGGGCGACATCGCCGCCAGGGACCTGATCT
GCGCCCAGAAGTTCAACGGCCTGACCGTGCTGCCCCCCCTGCTGACCGACGAGATGATCGCCCAGTACA
CCAGCGCCCTGCTGGCCGGCACCATCACCAGCGGCTGGACCTTCGGCGCCGGCGCCGCCCTGCAGATCC
CCTTCGCCATGCAGATGGCCTACAGGTTCAACGGCATCGGCGTGACCCAGAACGTGCTGTACGAGAACC
AGAAGCTGATCGCCAACCAGTTCAACAGCGCCATCGGCAAGATCCAGGACAGCCTGAGCAGCACCGCC
AGCGCCCTGGGCAAGCTGCAGGACGTGGTGAACCAGAACGCCCAGGCCCTGAACACCCTGGTGAAGCA
GCTGAGCAGCAACTTCGGCGCCATCAGCAGCGTGCTGAACGACATCCTGAGCAGGCTGGACAAGGTGG
AGGCCGAGGTGCAGATCGACAGGCTGATCACCGGCAGGCTGCAGAGCCTGCAGACCTACGTGACCCAG
CAGCTGATCAGGGCCGCCGAGATCAGGGCCAGCGCCAACCTGGCCGCCACCAAGATGAGCGAGTGCGT
GCTGGGCCAGAGCAAGAGGGTGGACTTCTGCGGCAAGGGCTACCACCTGATGAGCTTCCCCCAGAGCG
CCCCCCACGGCGTGGTGTTCCTGCACGTGACCTACGTGCCCGCCCAGGAGAAGAACTTCACCACCGCCC
CCGCCATCTGCCACGACGGCAAGGCCCACTTCCCCAGGGAGGGCGTGTTCGTGAGCAACGGCACCCACT
GGTTCGTGACCCAGAGGAACTTCTACGAGCCCCAGATCATCACCACCGACAACACCTTCGTGAGCGGCA
ACTGCGACGTGGTGATCGGCATCGTGAACAACACCGTGTACGACCCCCTGCAGCCCGAGCTGGACAGCT
TCAAGGAGGAGCTGGACAAGTACTTCAAGAACCACACCAGCCCCGACGTGGACCTGGGCGACATCAGC
GGCATCAACGCCAGCGTGGTGAACATCCAGAAGGAGATCGACAGGCTGAACGAGGTGGCCAAGAACCT
GAACGAGAGCCTGATCGACCTGCAGGAGCTGGGCAAGTACGAGCAGTACATCAAGTGGCCCTGGTACA
TCTGGCTGGGCTTCATCGCCGGCCTGATCGCCATCGTGATGGTGACCATCATGCTGTGCTGCATGACCAG
CTGCTGCAGCTGCCTGAAGGGCTGCTGCAGCTGCGGCAGCTGCTGCAAGTTCGACGAGGACGACAGCGA
GCCCGTGCTGAAGGGCGTGAAGCTGCACTACACC
3. LS3_SARS-COV2 S RBD
MDWTWILFLVAAATRVHSLRFGIVASRANHALVGGSGGSGGSGGSGGGRVQPTESIVRFP
NITNLCPFGEVFNATRFASVYAWNRKRISNCVADYSVLYNSASFSTFKCYGVSPTKL
NDLCFTNVYADSFVIRGDEVRQIAPGQTGKIADYNYKLPDDFTGCVIAWNSNNLDSK
VGGNYNYLYRLFRKSNLKPFERDISTEIYQAGSTPCNGVEGFNCYFPLQSYGFQPTNG
VGYQPYRVVVLSFELLHAPATVCGPKKSTNLVKNKCVNF
DNA sequence
ATGGACTGGACCTGGATCCTGTTCCTGGTGGCCGCCGCCACCAGGGTGCACAGCCTGAGGTTCGGCATCGTGGCCAGCA
GGGCCAACCACGCCCTGGTGGGCGGCAGCGGCGGCAGCGGCGGCAGCGGCGGCAGCGGCGGCGGCAGGGTGCAGCCCAC
CGAGAGCATCGTGAGGTTCCCCAACATCACCAACCTGTGCCCCTTCGGCGAGGTGTTCAACGCCACCAGGTTCGCCAGC
GTGTACGCCTGGAACAGGAAGAGGATCAGCAACTGCGTGGCCGACTACAGCGTGCTGTACAACAGCGCCAGCTTCAGCA
CCTTCAAGTGCTACGGCGTGAGCCCCACCAAGCTGAACGACCTGTGCTTCACCAACGTGTACGCCGACAGCTTCGTGAT
CAGGGGCGACGAGGTGAGGCAGATCGCCCCCGGCCAGACCGGCAAGATCGCCGACTACAACTACAAGCTGCCCGACGAC
TTCACCGGCTGCGTGATCGCCTGGAACAGCAACAACCTGGACAGCAAGGTGGGCGGCAACTACAACTACCTGTACAGGC
TGTTCAGGAAGAGCAACCTGAAGCCCTTCGAGAGGGACATCAGCACCGAGATCTACCAGGCCGGCAGCACCCCCTGCAA
CGGCGTGGAGGGCTTCAACTGCTACTTCCCCCTGCAGAGCTACGGCTTCCAGCCCACCAACGGCGTGGGCTACCAGCCC
TACAGGGTGGTGGTGCTGAGCTTCGAGCTGCTGCACGCCCCCGCCACCGTGTGCGGCCCCAAGAAGAGCACCAACCTGG
TGAAGAACAAGTGCGTGAACTTC
4. LS3_MERS-COV2 Spike
MDWTWILFLVAAATRVHSLRFGIVASRANHALVGGSGGSGGSGGSGGGMIHSVFLLMFL
LTPTESYVDVGPDSVKSACIEVDIQQTFFDKTWPRPIDVSKADGIIYPQGRTYSNITITY
QGLFPYQGDHGDMYVYSAGHATGTTPQKLFVANYSQDVKQFANGFVVRIGAAANS
TGTVIISPSTSATIRKIYPAFMLGSSVGNFSDGKMGRFFNHTLVLLPDGCGTLLRAFYC
ILEPRSGNHCPAGNSYTSFATYHTPATDCSDGNYNRNASLNSFKEYFNLRNCTFMYT
YNITEDEILEWFGITQTAQGVHLFSSRYVDLYGGNMFQFATLPVYDTIKYYSIIPHSIR
SIQSDRKAWAAFYVYKLQPLTFLLDFSVDGYIRRAIDCGFNDLSQLHCSYESFDVESG
VYSVSSFEAKPSGSVVEQAEGVECDFSPLLSGTPPQVYNFKRLVFTNCNYNLTKLLSL
FSVNDFTCSQISPAAIASNCYSSLILDYFSYPLSMKSDLSVSSAGPISQFNYKQSFSNPT
CLILATVPHNLTTITKPLKYSYINKCSRFLSDDRTEVPQLVNANQYSPCVSIVPSTVWE
DGDYYRKQLSPLEGGGWLVASGSTVAMTEQLQMGFGITVQYGTDTNSVCPKLEFA
NDTKIASQLGNCVEYSLYGVSGRGVFQNCTAVGVRQQRFVYDAYQNLVGYYSDDG
NYYCLRACVSVPVSVIYDKETKTHATLFGSVACEHISSTMSQYSRSTRSMLKRRDST
YGPLQTPVGCVLGLVNSSLFVEDCKLPLGQSLCALPDTPSTLTPRSVRSVPGEMRLAS
IAFNHPIQVDQLNSSYFKLSIPTNFSFGVTQEYIQTTIQKVTVDCKQYVCNGFQKCEQL
LREYGQFCSKINQALHGANLRQDDSVRNLFASVKSSQSSPIIPGFGGDFNLTLLEPVSI
STGSRSARSAIEDLLFDKVTIADPGYMQGYDDCMQQGPASARDLICAQYVAGYKVL
PPLMDVNMEAAYTSSLLGSIAGVGWTAGLSSFAAIPFAQSIFYRLNGVGITQQVLSEN
QKLIANKFNQALGAMQTGFTTTNEAFHKVQDAVNNNAQALSKLASELSNTFGAISA
SIGDIIQRLDVLEQDAQIDRLINGRLTTLNAFVAQQLVRSESAALSAQLAKDKVNECV
KAQSKRSGFCGQGTHIVSFVVNAPNGLYFMHVGYYPSNHIEVVSAYGLCDAANPTN
CIAPVNGYFIKTNNTRIVDEWSYTGSSFYAPEPITSLNTKYVAPQVTYQNISTNLPPPL
LGNSTGIDFQDELDEFFKNVSTSIPNFGSLTQINTTLLDLTYEMLSLQQVVKALNESYI
DLKELGNYTYYNKWPWYIWLGFIAGLVALALCVFFILCCTGCGTNCMGKLKCNRCC
DRYEEYDLEPHKVHVH
DNA sequence
ATGGACTGGACCTGGATCCTGTTCCTGGTGGCCGCCGCCACCAGGGTGCACAGCCTGAGGTTCGGCATC
GTGGCCAGCAGGGCCAACCACGCCCTGGTGGGCGGCAGCGGCGGCAGCGGCGGCAGCGGCGGCAGCGG
CGGCGGCATGATCCACAGCGTGTTCCTGCTGATGTTCCTGCTGACCCCCACCGAGAGCTACGTGGACGT
GGGCCCCGACAGCGTGAAGAGCGCCTGCATCGAGGTGGACATCCAGCAGACCTTCTTCGACAAGACCTG
GCCCAGGCCCATCGACGTGAGCAAGGCCGACGGCATCATCTACCCCCAGGGCAGGACCTACAGCAACA
TCACCATCACCTACCAGGGCCTGTTCCCCTACCAGGGCGACCACGGCGACATGTACGTGTACAGCGCCG
GCCACGCCACCGGCACCACCCCCCAGAAGCTGTTCGTGGCCAACTACAGCCAGGACGTGAAGCAGTTCG
CCAACGGCTTCGTGGTGAGGATCGGCGCCGCCGCCAACAGCACCGGCACCGTGATCATCAGCCCCAGCA
CCAGCGCCACCATCAGGAAGATCTACCCCGCCTTCATGCTGGGCAGCAGCGTGGGCAACTTCAGCGACG
GCAAGATGGGCAGGTTCTTCAACCACACCCTGGTGCTGCTGCCCGACGGCTGCGGCACCCTGCTGAGGG
CCTTCTACTGCATCCTGGAGCCCAGGAGCGGCAACCACTGCCCCGCCGGCAACAGCTACACCAGCTTCG
CCACCTACCACACCCCCGCCACCGACTGCAGCGACGGCAACTACAACAGGAACGCCAGCCTGAACAGC
TTCAAGGAGTACTTCAACCTGAGGAACTGCACCTTCATGTACACCTACAACATCACCGAGGACGAGATC
CTGGAGTGGTTCGGCATCACCCAGACCGCCCAGGGCGTGCACCTGTTCAGCAGCAGGTACGTGGACCTG
TACGGCGGCAACATGTTCCAGTTCGCCACCCTGCCCGTGTACGACACCATCAAGTACTACAGCATCATC
CCCCACAGCATCAGGAGCATCCAGAGCGACAGGAAGGCCTGGGCCGCCTTCTACGTGTACAAGCTGCA
GCCCCTGACCTTCCTGCTGGACTTCAGCGTGGACGGCTACATCAGGAGGGCCATCGACTGCGGCTTCAA
CGACCTGAGCCAGCTGCACTGCAGCTACGAGAGCTTCGACGTGGAGAGCGGCGTGTACAGCGTGAGCA
GCTTCGAGGCCAAGCCCAGCGGCAGCGTGGTGGAGCAGGCCGAGGGCGTGGAGTGCGACTTCAGCCCC
CTGCTGAGCGGCACCCCCCCCCAGGTGTACAACTTCAAGAGGCTGGTGTTCACCAACTGCAACTACAAC
CTGACCAAGCTGCTGAGCCTGTTCAGCGTGAACGACTTCACCTGCAGCCAGATCAGCCCCGCCGCCATC
GCCAGCAACTGCTACAGCAGCCTGATCCTGGACTACTTCAGCTACCCCCTGAGCATGAAGAGCGACCTG
AGCGTGAGCAGCGCCGGCCCCATCAGCCAGTTCAACTACAAGCAGAGCTTCAGCAACCCCACCTGCCTG
ATCCTGGCCACCGTGCCCCACAACCTGACCACCATCACCAAGCCCCTGAAGTACAGCTACATCAACAAG
TGCAGCAGGTTCCTGAGCGACGACAGGACCGAGGTGCCCCAGCTGGTGAACGCCAACCAGTACAGCCC
CTGCGTGAGCATCGTGCCCAGCACCGTGTGGGAGGACGGCGACTACTACAGGAAGCAGCTGAGCCCCCT
GGAGGGCGGCGGCTGGCTGGTGGCCAGCGGCAGCACCGTGGCCATGACCGAGCAGCTGCAGATGGGCT
TCGGCATCACCGTGCAGTACGGCACCGACACCAACAGCGTGTGCCCCAAGCTGGAGTTCGCCAACGACA
CCAAGATCGCCAGCCAGCTGGGCAACTGCGTGGAGTACAGCCTGTACGGCGTGAGCGGCAGGGGCGTG
TTCCAGAACTGCACCGCCGTGGGCGTGAGGCAGCAGAGGTTCGTGTACGACGCCTACCAGAACCTGGTG
GGCTACTACAGCGACGACGGCAACTACTACTGCCTGAGGGCCTGCGTGAGCGTGCCCGTGAGCGTGATC
TACGACAAGGAGACCAAGACCCACGCCACCCTGTTCGGCAGCGTGGCCTGCGAGCACATCAGCAGCAC
CATGAGCCAGTACAGCAGGAGCACCAGGAGCATGCTGAAGAGGAGGGACAGCACCTACGGCCCCCTGC
AGACCCCCGTGGGCTGCGTGCTGGGCCTGGTGAACAGCAGCCTGTTCGTGGAGGACTGCAAGCTGCCCC
TGGGCCAGAGCCTGTGCGCCCTGCCCGACACCCCCAGCACCCTGACCCCCAGGAGCGTGAGGAGCGTGC
CCGGCGAGATGAGGCTGGCCAGCATCGCCTTCAACCACCCCATCCAGGTGGACCAGCTGAACAGCAGCT
ACTTCAAGCTGAGCATCCCCACCAACTTCAGCTTCGGCGTGACCCAGGAGTACATCCAGACCACCATCC
AGAAGGTGACCGTGGACTGCAAGCAGTACGTGTGCAACGGCTTCCAGAAGTGCGAGCAGCTGCTGAGG
GAGTACGGCCAGTTCTGCAGCAAGATCAACCAGGCCCTGCACGGCGCCAACCTGAGGCAGGACGACAG
CGTGAGGAACCTGTTCGCCAGCGTGAAGAGCAGCCAGAGCAGCCCCATCATCCCCGGCTTCGGCGGCGA
CTTCAACCTGACCCTGCTGGAGCCCGTGAGCATCAGCACCGGCAGCAGGAGCGCCAGGAGCGCCATCG
AGGACCTGCTGTTCGACAAGGTGACCATCGCCGACCCCGGCTACATGCAGGGCTACGACGACTGCATGC
AGCAGGGCCCCGCCAGCGCCAGGGACCTGATCTGCGCCCAGTACGTGGCCGGCTACAAGGTGCTGCCCC
CCCTGATGGACGTGAACATGGAGGCCGCCTACACCAGCAGCCTGCTGGGCAGCATCGCCGGCGTGGGCT
GGACCGCCGGCCTGAGCAGCTTCGCCGCCATCCCCTTCGCCCAGAGCATCTTCTACAGGCTGAACGGCG
TGGGCATCACCCAGCAGGTGCTGAGCGAGAACCAGAAGCTGATCGCCAACAAGTTCAACCAGGCCCTG
GGCGCCATGCAGACCGGCTTCACCACCACCAACGAGGCCTTCCACAAGGTGCAGGACGCCGTGAACAA
CAACGCCCAGGCCCTGAGCAAGCTGGCCAGCGAGCTGAGCAACACCTTCGGCGCCATCAGCGCCAGCA
TCGGCGACATCATCCAGAGGCTGGACGTGCTGGAGCAGGACGCCCAGATCGACAGGCTGATCAACGGC
AGGCTGACCACCCTGAACGCCTTCGTGGCCCAGCAGCTGGTGAGGAGCGAGAGCGCCGCCCTGAGCGC
CCAGCTGGCCAAGGACAAGGTGAACGAGTGCGTGAAGGCCCAGAGCAAGAGGAGCGGCTTCTGCGGCC
AGGGCACCCACATCGTGAGCTTCGTGGTGAACGCCCCCAACGGCCTGTACTTCATGCACGTGGGCTACT
ACCCCAGCAACCACATCGAGGTGGTGAGCGCCTACGGCCTGTGCGACGCCGCCAACCCCACCAACTGCA
TCGCCCCCGTGAACGGCTACTTCATCAAGACCAACAACACCAGGATCGTGGACGAGTGGAGCTACACCG
GCAGCAGCTTCTACGCCCCCGAGCCCATCACCAGCCTGAACACCAAGTACGTGGCCCCCCAGGTGACCT
ACCAGAACATCAGCACCAACCTGCCCCCCCCCCTGCTGGGCAACAGCACCGGCATCGACTTCCAGGACG
AGCTGGACGAGTTCTTCAAGAACGTGAGCACCAGCATCCCCAACTTCGGCAGCCTGACCCAGATCAACA
CCACCCTGCTGGACCTGACCTACGAGATGCTGAGCCTGCAGCAGGTGGTGAAGGCCCTGAACGAGAGCT
ACATCGACCTGAAGGAGCTGGGCAACTACACCTACTACAACAAGTGGCCCTGGTACATCTGGCTGGGCT
TCATCGCCGGCCTGGTGGCCCTGGCCCTGTGCGTGTTCTTCATCCTGTGCTGCACCGGCTGCGGCACCAA
CTGCATGGGCAAGCTGAAGTGCAACAGGTGCTGCGACAGGTACGAGGAGTACGACCTGGAGCCCCACA
AGGTGCACGTGCAC
5. LS3_MERS-COV2 S RBD
MDWTWILFLVAAATRVHSLRFGIVASRANHALVGGSGGSGGSGGSGGGEAKPSGSVVEQ
AEGVECDFSPLLSGTPPQVYNFKRLVFTNCNYNLTKLLSLFSVNDFTCSQISPAAIASN
CYSSLILDYFSYPLSMKSDLSVSSAGPISQFNYKQSFSNPTCLILATVPHNLTTITKPLK
YSYINKCSRFLSDDRTEVPQLVNANQYSPCVSIVPSTVWEDGDYYRKQLSPLEGGGW
LVASGSTVAMTEQLQMGFGITVQYGTDTNSVCPKLEFANDTKIASQLGNCVEY
DNA sequence
ATGGACTGGACCTGGATCCTGTTCCTGGTGGCCGCCGCCACCAGGGTGCACAGCCTGAGGTTCGGCATCGTGGCCAGCA
GGGCCAACCACGCCCTGGTGGGCGGCAGCGGCGGCAGCGGCGGCAGCGGCGGCAGCGGCGGCGGCGAGGCCAAGCCCAG
CGGCAGCGTGGTGGAGCAGGCCGAGGGCGTGGAGTGCGACTTCAGCCCCCTGCTGAGCGGCACCCCCCCCCAGGTGTAC
AACTTCAAGAGGCTGGTGTTCACCAACTGCAACTACAACCTGACCAAGCTGCTGAGCCTGTTCAGCGTGAACGACTTCA
CCTGCAGCCAGATCAGCCCCGCCGCCATCGCCAGCAACTGCTACAGCAGCCTGATCCTGGACTACTTCAGCTACCCCCT
GAGCATGAAGAGCGACCTGAGCGTGAGCAGCGCCGGCCCCATCAGCCAGTTCAACTACAAGCAGAGCTTCAGCAACCCC
ACCTGCCTGATCCTGGCCACCGTGCCCCACAACCTGACCACCATCACCAAGCCCCTGAAGTACAGCTACATCAACAAGT
GCAGCAGGTTCCTGAGCGACGACAGGACCGAGGTGCCCCAGCTGGTGAACGCCAACCAGTACAGCCCCTGCGTGAGCAT
CGTGCCCAGCACCGTGTGGGAGGACGGCGACTACTACAGGAAGCAGCTGAGCCCCCTGGAGGGCGGCGGCTGGCTGGTG
GCCAGCGGCAGCACCGTGGCCATGACCGAGCAGCTGCAGATGGGCTTCGGCATCACCGTGCAGTACGGCACCGACACCA
ACAGCGTGTGCCCCAAGCTGGAGTTCGCCAACGACACCAAGATCGCCAGCCAGCTGGGCAACTGCGTGGAGTAC
6. LS3_RSV F
MDWTWILFLVAAATRVHSLRFGIVASRANHALVGGSGGSGGSGGSGGGNITEEFYQSTCS
AVSKGYLSALRTGWYTSVITIELSNIKENKCNGTDAKVKLIKQELDKYKNAVTELQL
LMQSTPPTNNRARRELPRFMNYTLNNAKKTNVTLSKKRKRRFLGFLLGVGSAIASGV
AVSKVLHLEGEVNKIKSALLSTNKAVVSLSNGVSVLTSKVLDLKNYIDKQLLPIVNK
QSCSISNIETVIEFQQKNNRLLEITREFSVNAGVTTPVSTYMLTNSELLSLINDMPITND
QKKLMSNNVQIVRQQSYSIMSIIKEEVLAYVVQLPLYGVIDTPCWKLHTSPLCTTNTK
EGSNICLTRTDRGWYCDNAGSVSFFPQAETCKVQSNRVFCDTMNSLTLPSEINLCNV
DIFNPKYDCKIMTSKTDVSSSVITSLGAIVSCYGKTKCTASNKNRGIIKTFSNGCDYVS
NKGMDTVSVGNTLYYVNKQEGKSLYVKGEPIINFYDPLVFPSDEFDASISQVNEKIN
QSLAFIRKSDELLHNVNAGKSTTNIMITT
DNA sequence
ATGGACTGGACCTGGATCCTGTTCCTGGTGGCCGCCGCCACCAGGGTGCACAGCCTGAGGTTCGGCATCGTGGCCAGCA
GGGCCAACCACGCCCTGGTGGGCGGCAGCGGCGGCAGCGGCGGCAGCGGCGGCAGCGGCGGCGGCAACATCACCGAGGA
GTTCTACCAGAGCACCTGCAGCGCCGTGAGCAAGGGCTACCTGAGCGCCCTGAGGACCGGCTGGTACACCAGCGTGATC
ACCATCGAGCTGAGCAACATCAAGGAGAACAAGTGCAACGGCACCGACGCCAAGGTGAAGCTGATCAAGCAGGAGCTGG
ACAAGTACAAGAACGCCGTGACCGAGCTGCAGCTGCTGATGCAGAGCACCCCCCCCACCAACAACAGGGCCAGGAGGGA
GCTGCCCAGGTTCATGAACTACACCCTGAACAACGCCAAGAAGACCAACGTGACCCTGAGCAAGAAGAGGAAGAGGAGG
TTCCTGGGCTTCCTGCTGGGCGTGGGCAGCGCCATCGCCAGCGGCGTGGCCGTGAGCAAGGTGCTGCACCTGGAGGGCG
AGGTGAACAAGATCAAGAGCGCCCTGCTGAGCACCAACAAGGCCGTGGTGAGCCTGAGCAACGGCGTGAGCGTGCTGAC
CAGCAAGGTGCTGGACCTGAAGAACTACATCGACAAGCAGCTGCTGCCCATCGTGAACAAGCAGAGCTGCAGCATCAGC
AACATCGAGACCGTGATCGAGTTCCAGCAGAAGAACAACAGGCTGCTGGAGATCACCAGGGAGTTCAGCGTGAACGCCG
GCGTGACCACCCCCGTGAGCACCTACATGCTGACCAACAGCGAGCTGCTGAGCCTGATCAACGACATGCCCATCACCAA
CGACCAGAAGAAGCTGATGAGCAACAACGTGCAGATCGTGAGGCAGCAGAGCTACAGCATCATGAGCATCATCAAGGAG
GAGGTGCTGGCCTACGTGGTGCAGCTGCCCCTGTACGGCGTGATCGACACCCCCTGCTGGAAGCTGCACACCAGCCCCC
TGTGCACCACCAACACCAAGGAGGGCAGCAACATCTGCCTGACCAGGACCGACAGGGGCTGGTACTGCGACAACGCCGG
CAGCGTGAGCTTCTTCCCCCAGGCCGAGACCTGCAAGGTGCAGAGCAACAGGGTGTTCTGCGACACCATGAACAGCCTG
ACCCTGCCCAGCGAGATCAACCTGTGCAACGTGGACATCTTCAACCCCAAGTACGACTGCAAGATCATGACCAGCAAGA
CCGACGTGAGCAGCAGCGTGATCACCAGCCTGGGCGCCATCGTGAGCTGCTACGGCAAGACCAAGTGCACCGCCAGCAA
CAAGAACAGGGGCATCATCAAGACCTTCAGCAACGGCTGCGACTACGTGAGCAACAAGGGCATGGACACCGTGAGCGTG
GGCAACACCCTGTACTACGTGAACAAGCAGGAGGGCAAGAGCCTGTACGTGAAGGGCGAGCCCATCATCAACTTCTACG
ACCCCCTGGTGTTCCCCAGCGACGAGTTCGACGCCAGCATCAGCCAGGTGAACGAGAAGATCAACCAGAGCCTGGCCTT
CATCAGGAAGAGCGACGAGCTGCTGCACAACGTGAACGCCGGCAAGAGCACCACCAACATCATGATCACCACC
7. LS3_H3-Kansas-2017_HA
MDWTWILFLVAAATRVHSLRFGIVASRANHALVGGSGGSGGSGGSGGGMKTIIALSCILC
LVFAQKIPGNDNSTATLCLGHHAVPNGTIVKTITNDRIEVTNATELVQNSSIGEICDSP
HQILDGENCTLIDALLGDPQCDGFQNKKWDLFVERNKAYSNCYPYDVPDYASLRSL
VASSGTLEFNNESFNWAGVTQNGTSSSCIRGSKSSFFSRLNWLTHLNSKYPALNVTM
PNNEQFDKLYIWGVHHPGTDKNQISLYAQSSGRITVSTKRSQQAVIPNIGSRPRIRDIP
SRISIYWTIVKPGDILLINSTGNLIAPRGYFKIRSGKSSIMRSDAPIGKCKSECITPNGSIP
NDKPFQNVNRITYGACPRYVKQSTLKLATGMRNVPERQTRGIFGAIAGFIENGWEG
MVDGWYGFRHQNSEGRGQAADLKSTQAAIDQINGKLNRLIGKTNEKFHQIEKEFSE
VEGRIQDLEKYVEDTKIDLWSYNAELLVALENQHTIDLTDSEMNKLFEKTKKQLREN
AEDMGNGCFKIYHKCDNACMGSIRNGTYDHNVYRDEALNNRFQIK
DNA sequence
ATGGACTGGACCTGGATCCTGTTCCTGGTGGCCGCCGCCACCAGGGTGCACAGCCTGAGGTTCGGCATCGTGGCCAGCA
GGGCCAACCACGCCCTGGTGGGCGGCAGCGGCGGCAGCGGCGGCAGCGGCGGCAGCGGCGGCGGCATGAAGACCATCAT
CGCCCTGAGCTGCATCCTGTGCCTGGTGTTCGCCCAGAAGATCCCCGGCAACGACAACAGCACCGCCACCCTGTGCCTG
GGCCACCACGCCGTGCCCAACGGCACCATCGTGAAGACCATCACCAACGACAGGATCGAGGTGACCAACGCCACCGAGC
TGGTGCAGAACAGCAGCATCGGCGAGATCTGCGACAGCCCCCACCAGATCCTGGACGGCGAGAACTGCACCCTGATCGA
CGCCCTGCTGGGCGACCCCCAGTGCGACGGCTTCCAGAACAAGAAGTGGGACCTGTTCGTGGAGAGGAACAAGGCCTAC
AGCAACTGCTACCCCTACGACGTGCCCGACTACGCCAGCCTGAGGAGCCTGGTGGCCAGCAGCGGCACCCTGGAGTTCA
ACAACGAGAGCTTCAACTGGGCCGGCGTGACCCAGAACGGCACCAGCAGCAGCTGCATCAGGGGCAGCAAGAGCAGCTT
CTTCAGCAGGCTGAACTGGCTGACCCACCTGAACAGCAAGTACCCCGCCCTGAACGTGACCATGCCCAACAACGAGCAG
TTCGACAAGCTGTACATCTGGGGCGTGCACCACCCCGGCACCGACAAGAACCAGATCAGCCTGTACGCCCAGAGCAGCG
GCAGGATCACCGTGAGCACCAAGAGGAGCCAGCAGGCCGTGATCCCCAACATCGGCAGCAGGCCCAGGATCAGGGACAT
CCCCAGCAGGATCAGCATCTACTGGACCATCGTGAAGCCCGGCGACATCCTGCTGATCAACAGCACCGGCAACCTGATC
GCCCCCAGGGGCTACTTCAAGATCAGGAGCGGCAAGAGCAGCATCATGAGGAGCGACGCCCCCATCGGCAAGTGCAAGA
GCGAGTGCATCACCCCCAACGGCAGCATCCCCAACGACAAGCCCTTCCAGAACGTGAACAGGATCACCTACGGCGCCTG
CCCCAGGTACGTGAAGCAGAGCACCCTGAAGCTGGCCACCGGCATGAGGAACGTGCCCGAGAGGCAGACCAGGGGCATC
TTCGGCGCCATCGCCGGCTTCATCGAGAACGGCTGGGAGGGCATGGTGGACGGCTGGTACGGCTTCAGGCACCAGAACA
GCGAGGGCAGGGGCCAGGCCGCCGACCTGAAGAGCACCCAGGCCGCCATCGACCAGATCAACGGCAAGCTGAACAGGCT
GATCGGCAAGACCAACGAGAAGTTCCACCAGATCGAGAAGGAGTTCAGCGAGGTGGAGGGCAGGATCCAGGACCTGGAG
AAGTACGTGGAGGACACCAAGATCGACCTGTGGAGCTACAACGCCGAGCTGCTGGTGGCCCTGGAGAACCAGCACACCA
TCGACCTGACCGACAGCGAGATGAACAAGCTGTTCGAGAAGACCAAGAAGCAGCTGAGGGAGAACGCCGAGGACATGGG
CAACGGCTGCTTCAAGATCTACCACAAGTGCGACAACGCCTGCATGGGCAGCATCAGGAACGGCACCTACGACCACAAC
GTGTACAGGGACGAGGCCCTGAACAACAGGTTCCAGATCAAG
8. LS3_H1-Brisbane-2018_HA
MDWTWILFLVAAATRVHSLRFGIVASRANHALVGGSGGSGGSGGSGGGMKAILVVLLYT
FTTANADTLCIGYHANNSTDTVDTVLEKNVTVTHSVNLLEDKHNGKLCKLGGVAPL
HLGKCNIAGWILGNPECESLSTARSWSYIVETSNSDNGTCYPGDFINYEELREQLSSV
SSFERFEIFPKTSSWPNHDSNKGVTAACPHAGAKSFYKNLIWLVKKGNSYPKLNQTY
INDKGKEVLVLWGIHHPPTTADQQSLYQNADAYVFVGTSRYSKKFKPEIATRPKVRD
REGRMNYYWTLVEPGDKITFEATGNLVVPRYAFTMERNAGSGIIISDTPVHDCNTTC
QTAEGAINTSLPFQNVHPVTIGKCPKYVKSTKLRLATGLRNVPSIQSRGLFGAIAGFIE
GGWTGMVDGWYGYHHQNEQGSGYAADLKSTQNAIDKITNKVNSVIEKMNTQFTA
VGKEFNHLEKRIENLNKKVDDGFLDIWTYNAELLVLLENERTLDYHDSNVKNLYEK
VRNQLKNNAKEIGNGCFEFYHKCDNTCMESVKNGTYDYPKYSEEAKLNREKID
DNA sequence
ATGGACTGGACCTGGATCCTGTTCCTGGTGGCCGCCGCCACCAGGGTGCACAGCCTGAGGTTCGGCATCGTGGCCAGCA
GGGCCAACCACGCCCTGGTGGGCGGCAGCGGCGGCAGCGGCGGCAGCGGCGGCAGCGGCGGCGGCATGAAGGCCATCCT
GGTGGTGCTGCTGTACACCTTCACCACCGCCAACGCCGACACCCTGTGCATCGGCTACCACGCCAACAACAGCACCGAC
ACCGTGGACACCGTGCTGGAGAAGAACGTGACCGTGACCCACAGCGTGAACCTGCTGGAGGACAAGCACAACGGCAAGC
TGTGCAAGCTGGGCGGCGTGGCCCCCCTGCACCTGGGCAAGTGCAACATCGCCGGCTGGATCCTGGGCAACCCCGAGTG
CGAGAGCCTGAGCACCGCCAGGAGCTGGAGCTACATCGTGGAGACCAGCAACAGCGACAACGGCACCTGCTACCCCGGC
GACTTCATCAACTACGAGGAGCTGAGGGAGCAGCTGAGCAGCGTGAGCAGCTTCGAGAGGTTCGAGATCTTCCCCAAGA
CCAGCAGCTGGCCCAACCACGACAGCAACAAGGGCGTGACCGCCGCCTGCCCCCACGCCGGCGCCAAGAGCTTCTACAA
GAACCTGATCTGGCTGGTGAAGAAGGGCAACAGCTACCCCAAGCTGAACCAGACCTACATCAACGACAAGGGCAAGGAG
GTGCTGGTGCTGTGGGGCATCCACCACCCCCCCACCACCGCCGACCAGCAGAGCCTGTACCAGAACGCCGACGCCTACG
TGTTCGTGGGCACCAGCAGGTACAGCAAGAAGTTCAAGCCCGAGATCGCCACCAGGCCCAAGGTGAGGGACAGGGAGGG
CAGGATGAACTACTACTGGACCCTGGTGGAGCCCGGCGACAAGATCACCTTCGAGGCCACCGGCAACCTGGTGGTGCCC
AGGTACGCCTTCACCATGGAGAGGAACGCCGGCAGCGGCATCATCATCAGCGACACCCCCGTGCACGACTGCAACACCA
CCTGCCAGACCGCCGAGGGCGCCATCAACACCAGCCTGCCCTTCCAGAACGTGCACCCCGTGACCATCGGCAAGTGCCC
CAAGTACGTGAAGAGCACCAAGCTGAGGCTGGCCACCGGCCTGAGGAACGTGCCCAGCATCCAGAGCAGGGGCCTGTTC
GGCGCCATCGCCGGCTTCATCGAGGGCGGCTGGACCGGCATGGTGGACGGCTGGTACGGCTACCACCACCAGAACGAGC
AGGGCAGCGGCTACGCCGCCGACCTGAAGAGCACCCAGAACGCCATCGACAAGATCACCAACAAGGTGAACAGCGTGAT
CGAGAAGATGAACACCCAGTTCACCGCCGTGGGCAAGGAGTTCAACCACCTGGAGAAGAGGATCGAGAACCTGAACAAG
AAGGTGGACGACGGCTTCCTGGACATCTGGACCTACAACGCCGAGCTGCTGGTGCTGCTGGAGAACGAGAGGACCCTGG
ACTACCACGACAGCAACGTGAAGAACCTGTACGAGAAGGTGAGGAACCAGCTGAAGAACAACGCCAAGGAGATCGGCAA
CGGCTGCTTCGAGTTCTACCACAAGTGCGACAACACCTGCATGGAGAGCGTGAAGAACGGCACCTACGACTACCCCAAG
TACAGCGAGGAGGCCAAGCTGAACAGGGAGAAGATCGAC
9. LS3_B-Colorado-2017_HA
MDWTWILFLVAAATRVHSLRFGIVASRANHALVGGSGGSGGSGGSGGGMKAIIVLLMVV
TSSADRICTGITSSNSPHVVKTATQGEVNVTGVIPLTTTPTKSHFANLKGTETRGKLCP
KCLNCTDLDVALGRPKCTGKIPSARVSILHEVRPVTSGCFPIMHDRTKIRQLPNLLRG
YEHVRLSTHNVINAEGAPGGPYKIGTSGSCPNITNGNGFFATMAWAVPDKNKTATNP
LTIEVPYVCTEGEDQITVWGFHSDTETQMAKLYGDSKPQKFTSSANGVTTHYVSQIG
GFPNQTEDGGLPQSGRIVVDYMVQKSGKTGTITYQRGILLPQKVWCASGRSKVIKGS
LPLIGEADCLHEKYGGLNKSKPYYTGEHAKAIGNCPIWVKTPLKLANGTKYRPPAKL
LKERGFFGAIAGFLEGGWEGMIAGWHGYTSHGAHGVAVAADLKSTQEAINKITKNL
NSLSELEVKNLQRLSGAMDELHNEILELDEKVDDLRADTISSQIELAVLLSNEGIINSE
DEHLLALERKLKKMLGPSAVEIGNGCFETKHKCNQTCLDKIAAGTFDAGEFSLPTFD
SLNIT
DNA sequence
ATGGACTGGACCTGGATCCTGTTCCTGGTGGCCGCCGCCACCAGGGTGCACAGCCTGAGGTTCGGCATCGTGGCCAGCA
GGGCCAACCACGCCCTGGTGGGCGGCAGCGGCGGCAGCGGCGGCAGCGGCGGCAGCGGCGGCGGCATGAAGGCCATCAT
CGTGCTGCTGATGGTGGTGACCAGCAGCGCCGACAGGATCTGCACCGGCATCACCAGCAGCAACAGCCCCCACGTGGTG
AAGACCGCCACCCAGGGCGAGGTGAACGTGACCGGCGTGATCCCCCTGACCACCACCCCCACCAAGAGCCACTTCGCCA
ACCTGAAGGGCACCGAGACCAGGGGCAAGCTGTGCCCCAAGTGCCTGAACTGCACCGACCTGGACGTGGCCCTGGGCAG
GCCCAAGTGCACCGGCAAGATCCCCAGCGCCAGGGTGAGCATCCTGCACGAGGTGAGGCCCGTGACCAGCGGCTGCTTC
CCCATCATGCACGACAGGACCAAGATCAGGCAGCTGCCCAACCTGCTGAGGGGCTACGAGCACGTGAGGCTGAGCACCC
ACAACGTGATCAACGCCGAGGGCGCCCCCGGCGGCCCCTACAAGATCGGCACCAGCGGCAGCTGCCCCAACATCACCAA
CGGCAACGGCTTCTTCGCCACCATGGCCTGGGCCGTGCCCGACAAGAACAAGACCGCCACCAACCCCCTGACCATCGAG
GTGCCCTACGTGTGCACCGAGGGCGAGGACCAGATCACCGTGTGGGGCTTCCACAGCGACACCGAGACCCAGATGGCCA
AGCTGTACGGCGACAGCAAGCCCCAGAAGTTCACCAGCAGCGCCAACGGCGTGACCACCCACTACGTGAGCCAGATCGG
CGGCTTCCCCAACCAGACCGAGGACGGCGGCCTGCCCCAGAGCGGCAGGATCGTGGTGGACTACATGGTGCAGAAGAGC
GGCAAGACCGGCACCATCACCTACCAGAGGGGCATCCTGCTGCCCCAGAAGGTGTGGTGCGCCAGCGGCAGGAGCAAGG
TGATCAAGGGCAGCCTGCCCCTGATCGGCGAGGCCGACTGCCTGCACGAGAAGTACGGCGGCCTGAACAAGAGCAAGCC
CTACTACACCGGCGAGCACGCCAAGGCCATCGGCAACTGCCCCATCTGGGTGAAGACCCCCCTGAAGCTGGCCAACGGC
ACCAAGTACAGGCCCCCCGCCAAGCTGCTGAAGGAGAGGGGCTTCTTCGGCGCCATCGCCGGCTTCCTGGAGGGCGGCT
GGGAGGGCATGATCGCCGGCTGGCACGGCTACACCAGCCACGGCGCCCACGGCGTGGCCGTGGCCGCCGACCTGAAGAG
CACCCAGGAGGCCATCAACAAGATCACCAAGAACCTGAACAGCCTGAGCGAGCTGGAGGTGAAGAACCTGCAGAGGCTG
AGCGGCGCCATGGACGAGCTGCACAACGAGATCCTGGAGCTGGACGAGAAGGTGGACGACCTGAGGGCCGACACCATCA
GCAGCCAGATCGAGCTGGCCGTGCTGCTGAGCAACGAGGGCATCATCAACAGCGAGGACGAGCACCTGCTGGCCCTGGA
GAGGAAGCTGAAGAAGATGCTGGGCCCCAGCGCCGTGGAGATCGGCAACGGCTGCTTCGAGACCAAGCACAAGTGCAAC
CAGACCTGCCTGGACAAGATCGCCGCCGGCACCTTCGACGCCGGCGAGTTCAGCCTGCCCACCTTCGACAGCCTGAACA
TCACC
10. LS3_B-Phuket-2013_HA
MDWTWILFLVAAATRVHSLRFGIVASRANHALVGGSGGSGGSGGSGGGMKAIIVLLMVV
TSNADRICTGITSSNSPHVVKTATQGEVNVTGVIPLTTTPTKSYFANLKGTRTRGKLC
PDCLNCTDLDVALGRPMCVGTTPSAKASILHEVRPVTSGCFPIMHDRTKIRQLPNLLR
GYEKIRLSTQNVIDAEKAPGGPYRLGTSGSCPNATSKIGFFATMAWAVPKDNYKNAT
NPLTVEVPYICTEGEDQITVWGFHSDDKTQMKSLYGDSNPQKFTSSANGVTTHYVSQ
IGDFPDQTEDGGLPQSGRIVVDYMMQKPGKTGTIVYQRGVLLPQKVWCASGRSKVI
KGSLPLIGEADCLHEEYGGLNKSKPYYTGKHAKAIGNCPIWVKTPLKLANGTKYRPP
AKLLKERGFFGAIAGFLEGGWEGMIAGWHGYTSHGAHGVAVAADLKSTQEAINKIT
KNLNSLSELEVKNLQRLSGAMDELHNEILELDEKVDDLRADTISSQIELAVLLSNEGII
NSEDEHLLALERKLKKMLGPSAVDIGNGCFETKHKCNQTCLDRIAAGTFNAGEFSLP
TFDSLNIT
DNA sequence
ATGGACTGGACCTGGATCCTGTTCCTGGTGGCCGCCGCCACCAGGGTGCACAGCCTGAGGTTCGGCATCGTGGCCAGCA
GGGCCAACCACGCCCTGGTGGGCGGCAGCGGCGGCAGCGGCGGCAGCGGCGGCAGCGGCGGCGGCATGAAGGCCATCAT
CGTGCTGCTGATGGTGGTGACCAGCAACGCCGACAGGATCTGCACCGGCATCACCAGCAGCAACAGCCCCCACGTGGTG
AAGACCGCCACCCAGGGCGAGGTGAACGTGACCGGCGTGATCCCCCTGACCACCACCCCCACCAAGAGCTACTTCGCCA
ACCTGAAGGGCACCAGGACCAGGGGCAAGCTGTGCCCCGACTGCCTGAACTGCACCGACCTGGACGTGGCCCTGGGCAG
GCCCATGTGCGTGGGCACCACCCCCAGCGCCAAGGCCAGCATCCTGCACGAGGTGAGGCCCGTGACCAGCGGCTGCTTC
CCCATCATGCACGACAGGACCAAGATCAGGCAGCTGCCCAACCTGCTGAGGGGCTACGAGAAGATCAGGCTGAGCACCC
AGAACGTGATCGACGCCGAGAAGGCCCCCGGCGGCCCCTACAGGCTGGGCACCAGCGGCAGCTGCCCCAACGCCACCAG
CAAGATCGGCTTCTTCGCCACCATGGCCTGGGCCGTGCCCAAGGACAACTACAAGAACGCCACCAACCCCCTGACCGTG
GAGGTGCCCTACATCTGCACCGAGGGCGAGGACCAGATCACCGTGTGGGGCTTCCACAGCGACGACAAGACCCAGATGA
AGAGCCTGTACGGCGACAGCAACCCCCAGAAGTTCACCAGCAGCGCCAACGGCGTGACCACCCACTACGTGAGCCAGAT
CGGCGACTTCCCCGACCAGACCGAGGACGGCGGCCTGCCCCAGAGCGGCAGGATCGTGGTGGACTACATGATGCAGAAG
CCCGGCAAGACCGGCACCATCGTGTACCAGAGGGGCGTGCTGCTGCCCCAGAAGGTGTGGTGCGCCAGCGGCAGGAGCA
AGGTGATCAAGGGCAGCCTGCCCCTGATCGGCGAGGCCGACTGCCTGCACGAGGAGTACGGCGGCCTGAACAAGAGCAA
GCCCTACTACACCGGCAAGCACGCCAAGGCCATCGGCAACTGCCCCATCTGGGTGAAGACCCCCCTGAAGCTGGCCAAC
GGCACCAAGTACAGGCCCCCCGCCAAGCTGCTGAAGGAGAGGGGCTTCTTCGGCGCCATCGCCGGCTTCCTGGAGGGCG
GCTGGGAGGGCATGATCGCCGGCTGGCACGGCTACACCAGCCACGGCGCCCACGGCGTGGCCGTGGCCGCCGACCTGAA
GAGCACCCAGGAGGCCATCAACAAGATCACCAAGAACCTGAACAGCCTGAGCGAGCTGGAGGTGAAGAACCTGCAGAGG
CTGAGCGGCGCCATGGACGAGCTGCACAACGAGATCCTGGAGCTGGACGAGAAGGTGGACGACCTGAGGGCCGACACCA
TCAGCAGCCAGATCGAGCTGGCCGTGCTGCTGAGCAACGAGGGCATCATCAACAGCGAGGACGAGCACCTGCTGGCCCT
GGAGAGGAAGCTGAAGAAGATGCTGGGCCCCAGCGCCGTGGACATCGGCAACGGCTGCTTCGAGACCAAGCACAAGTGC
AACCAGACCTGCCTGGACAGGATCGCCGCCGGCACCTTCAACGCCGGCGAGTTCAGCCTGCCCACCTTCGACAGCCTGA
ACATCACC
11. LS3_CA09_RBD_HA
MDWTWILFLVAAATRVHSLRFGIVASRANHALVGGSGGSGGSGGSGGGAPLHLGKCNIAGW
ILGNPECESLSTASSWSYIVETPSSDNGTCEPGDFIDYEELREQLSSVSSFERFEIFPKTSSWPNHDSNKGVT
AACPHAGAKSFYKNLIWLVKKGNSYPKLSKSYINDKGKEVLVLWGIHHPSTSADQQSLYQNADTYVFVGS
SRYSKKFKPEIAIRPKVRDQEGRMNYYWTLVEPGDKITFEATGNLVVPRYAFAMERN
DNA sequence
ATGGACTGGACCTGGATCCTGTTCCTGGTGGCCGCCGCCACCAGGGTGCACAGCCTGAGGTTCGGCATCGTGGCCAGCA
GGGCCAACCACGCCCTGGTGGGCGGCAGCGGCGGCAGCGGCGGCAGCGGCGGCAGCGGCGGCGGCGCCCCCCTGCACCT
GGGCAAGTGCAACATCGCCGGCTGGATCCTGGGCAACCCCGAGTGCGAGAGCCTGAGCACCGCCAGCAGCTGGAGCTAC
ATCGTGGAGACCCCCAGCAGCGACAACGGCACCTGCTTCCCCGGCGACTTCATCGACTACGAGGAGCTGAGGGAGCAGC
TGAGCAGCGTGAGCAGCTTCGAGAGGTTCGAGATCTTCCCCAAGACCAGCAGCTGGCCCAACCACGACAGCAACAAGGG
CGTGACCGCCGCCTGCCCCCACGCCGGCGCCAAGAGCTTCTACAAGAACCTGATCTGGCTGGTGAAGAAGGGCAACAGC
TACCCCAAGCTGAGCAAGAGCTACATCAACGACAAGGGCAAGGAGGTGCTGGTGCTGTGGGGCATCCACCACCCCAGCA
CCAGCGCCGACCAGCAGAGCCTGTACCAGAACGCCGACACCTACGTGTTCGTGGGCAGCAGCAGGTACAGCAAGAAGTT
CAAGCCCGAGATCGCCATCAGGCCCAAGGTGAGGGACCAGGAGGGCAGGATGAACTACTACTGGACCCTGGTGGAGCCC
GGCGACAAGATCACCTTCGAGGCCACCGGCAACCTGGTGGTGCCCAGGTACGCCTTCGCCATGGAGAGGAAC
12. LS3_MD39
MDWTWILFLVAAATRVHSLRFGIVASRANHALVGGSGGSGGSGGSGGGAE
NLWVTVYYGV PVWKDAETTL FCASDAKAYE TEKHNVWATH ACVPTDPNPQ
EIHLENVTEE FNMWKNNMVE QMHEDIISLW DQSLKPCVKL TPLCVTLQCT
NVTNNITDDM RGELKNCSFN MTTELRDKKQ KVYSLFYRLD VVQINENQGN
RSNNSNKEYR LINCNTSAIT QACPKVSFEP IPIHYCAPAG FAILKCKDKK
FNGTGPCPSV STVQCTHGIK PVVSTQLLLN GSLAEEEVII RSENITNNAK
NILVQLNTPV QINCTRPNNN TVKSIRIGPG QAFYYTGDII GDIRQAHCNV
SKATWNETLG KVVKQLRKHF GNNTIIRFAQ SSGGDLEVTT HSFNCGGEFF
YCNTSGLFNS TWISNTSVQG SNSTGSNDSI TLPCRIKQII NMWQRIGQAM
YAPPIQGVIR CVSNITGLIL TRDGGSTNST TETFRPGGGD MRDNWRSELY
KYKVVKIEPL GVAPTRCKRR VVGRRRRRRA VGIGAVSLGF LGAAGSTMGA
ASMTLTVQAR NLLSGIVQQQ SNLLRAPEPQ QHLLKDTHWG IKQLQARVLA
VEHYLRDQQL LGIWGCSGKL ICCTNVPWNS SWSNRNLSEI WDNMTWLQWD
KEISNYTQII YGLLEESQNQ QEKNEQDLLA LD
DNA Sequence
ATGGACTGGACCTGGATCCTGTTCCTGGTGGCCGCCGCCACCAGGGTGCACAGCCTGAGGTTCGGCATCGTGGCCAGCA
GGGCCAACCACGCCCTGGTGGGCGGCAGCGGCGGCAGCGGCGGCAGCGGCGGCAGCGGCGGCGGCGCCGAGAACCTGTG
GGTGACCGTGTACTACGGCGTGCCCGTGTGGAAGGACGCCGAGACCACCCTGTTCTGCGCCAGCGACGCCAAGGCCTAC
GAGACCGAGAAGCACAACGTGTGGGCCACCCACGCCTGCGTGCCCACCGACCCCAACCCCCAGGAGATCCACCTGGAGA
ACGTGACCGAGGAGTTCAACATGTGGAAGAACAACATGGTGGAGCAGATGCACGAGGACATCATCAGCCTGTGGGACCA
GAGCCTGAAGCCCTGCGTGAAGCTGACCCCCCTGTGCGTGACCCTGCAGTGCACCAACGTGACCAACAACATCACCGAC
GACATGAGGGGCGAGCTGAAGAACTGCAGCTTCAACATGACCACCGAGCTGAGGGACAAGAAGCAGAAGGTGTACAGCC
TGTTCTACAGGCTGGACGTGGTGCAGATCAACGAGAACCAGGGCAACAGGAGCAACAACAGCAACAAGGAGTACAGGCT
GATCAACTGCAACACCAGCGCCATCACCCAGGCCTGCCCCAAGGTGAGCTTCGAGCCCATCCCCATCCACTACTGCGCC
CCCGCCGGCTTCGCCATCCTGAAGTGCAAGGACAAGAAGTTCAACGGCACCGGCCCCTGCCCCAGCGTGAGCACCGTGC
AGTGCACCCACGGCATCAAGCCCGTGGTGAGCACCCAGCTGCTGCTGAACGGCAGCCTGGCCGAGGAGGAGGTGATCAT
CAGGAGCGAGAACATCACCAACAACGCCAAGAACATCCTGGTGCAGCTGAACACCCCCGTGCAGATCAACTGCACCAGG
CCCAACAACAACACCGTGAAGAGCATCAGGATCGGCCCCGGCCAGGCCTTCTACTACACCGGCGACATCATCGGCGACA
TCAGGCAGGCCCACTGCAACGTGAGCAAGGCCACCTGGAACGAGACCCTGGGCAAGGTGGTGAAGCAGCTGAGGAAGCA
CTTCGGCAACAACACCATCATCAGGTTCGCCCAGAGCAGCGGCGGCGACCTGGAGGTGACCACCCACAGCTTCAACTGC
GGCGGCGAGTTCTTCTACTGCAACACCAGCGGCCTGTTCAACAGCACCTGGATCAGCAACACCAGCGTGCAGGGCAGCA
ACAGCACCGGCAGCAACGACAGCATCACCCTGCCCTGCAGGATCAAGCAGATCATCAACATGTGGCAGAGGATCGGCCA
GGCCATGTACGCCCCCCCCATCCAGGGCGTGATCAGGTGCGTGAGCAACATCACCGGCCTGATCCTGACCAGGGACGGC
GGCAGCACCAACAGCACCACCGAGACCTTCAGGCCCGGCGGCGGCGACATGAGGGACAACTGGAGGAGCGAGCTGTACA
AGTACAAGGTGGTGAAGATCGAGCCCCTGGGCGTGGCCCCCACCAGGTGCAAGAGGAGGGTGGTGGGCAGGAGGAGGAG
GAGGAGGGCCGTGGGCATCGGCGCCGTGAGCCTGGGCTTCCTGGGCGCCGCCGGCAGCACCATGGGCGCCGCCAGCATG
ACCCTGACCGTGCAGGCCAGGAACCTGCTGAGCGGCATCGTGCAGCAGCAGAGCAACCTGCTGAGGGCCCCCGAGCCCC
AGCAGCACCTGCTGAAGGACACCCACTGGGGCATCAAGCAGCTGCAGGCCAGGGTGCTGGCCGTGGAGCACTACCTGAG
GGACCAGCAGCTGCTGGGCATCTGGGGCTGCAGCGGCAAGCTGATCTGCTGCACCAACGTGCCCTGGAACAGCAGCTGG
AGCAACAGGAACCTGAGCGAGATCTGGGACAACATGACCTGGCTGCAGTGGGACAAGGAGATCAGCAACTACACCCAGA
TCATCTACGGCCTGCTGGAGGAGAGCCAGAACCAGCAGGAGAAGAACGAGCAGGACCTGCTGGCCCTGGAC
13. F_LS3_E2p_pVax
MDWTWILFLVAAATRVHSMGQIVTFFQEVPHVIEEVMNIVLIALSVLAVLKGLYNFATCGLVGLV
TFLLLCGRSCTTSLYKGVYELQTLELNMETLNMTMPLSCTKNNSHHYIMVGNETGLELTLTNT
SIINHKFCNLSDAHKKNLYDHALMSIISTFHLSIPNFNQYEAMSCDENGGKISVQYNLSHSYAGD
AANHCGTVANGVLOTFMRMAWGGSYIALDSGRGNWDCIMTSYQYLIIQNTTWEDHCQFSRP
SPIGYLGLLSORTRDIYISRRLLGTFTWTLSDSEGKDTPGGYCLTRWMLIEAELKCFGNTAVAK
CNEKHDEEFCDMLRLFDFNKQAIQRLKAEAQMSIQLINKAVNALINDQLIMKNHLRDIMGIPY
CNYSKYWYLNHTTTGRTSLPKCWLVSNGSYLNETHFSDDIEQQADNMITEMLOKEYMENQS
GGSGGLRFGIVASRANHALVGGSGGAAAKPATTEGEFPETREKMSGIRRAIAKAMVHSKHTAP
HVTLMDEADVTKLVAHRKKFKAIAAEKGIKLTFLPYVVKALVSALREYPVLNTSIDDETEEIIQ
KHYYNIGIAADTDRGLLVPVIKHADRKPIFALAQEINELAEKARDGKLTPGEMKGASCTITNIGS
AGGQWFTPVINHPEVAILGIGRIAEKPIVRDGEIVAAPMLALSLSFDHRMIDGATAQKALNHIK
RLLSDPELLLM**
DNA sequence
ATGGACTGGACCTGGATCCTGTTCCTGGTGGCCGCCGCCACCAGGGTGCACAGCATGGGCCAGATCGTGACCTTCTTCC
AGGAGGTGCCCCACGTGATCGAGGAGGTGATGAACATCGTGCTGATCGCCCTGAGCGTGCTGGCCGTGCTGAAGGGCCT
GTACAACTTCGCCACCTGCGGCCTGGTGGGCCTGGTGACCTTCCTGCTGCTGTGCGGCAGGAGCTGCACCACCAGCCTG
TACAAGGGCGTGTACGAGCTGCAGACCCTGGAGCTGAACATGGAGACCCTGAACATGACCATGCCCCTGAGCTGCACCA
AGAACAACAGCCACCACTACATCATGGTGGGCAACGAGACCGGCCTGGAGCTGACCCTGACCAACACCAGCATCATCAA
CCACAAGTTCTGCAACCTGAGCGACGCCCACAAGAAGAACCTGTACGACCACGCCCTGATGAGCATCATCAGCACCTTC
CACCTGAGCATCCCCAACTTCAACCAGTACGAGGCCATGAGCTGCGACTTCAACGGCGGCAAGATCAGCGTGCAGTACA
ACCTGAGCCACAGCTACGCCGGCGACGCCGCCAACCACTGCGGCACCGTGGCCAACGGCGTGCTGCAGACCTTCATGAG
GATGGCCTGGGGCGGCAGCTACATCGCCCTGGACAGCGGCAGGGGCAACTGGGACTGCATCATGACCAGCTACCAGTAC
CTGATCATCCAGAACACCACCTGGGAGGACCACTGCCAGTTCAGCAGGCCCAGCCCCATCGGCTACCTGGGCCTGCTGA
GCCAGAGGACCAGGGACATCTACATCAGCAGGAGGCTGCTGGGCACCTTCACCTGGACCCTGAGCGACAGCGAGGGCAA
GGACACCCCCGGCGGCTACTGCCTGACCAGGTGGATGCTGATCGAGGCCGAGCTGAAGTGCTTCGGCAACACCGCCGTG
GCCAAGTGCAACGAGAAGCACGACGAGGAGTTCTGCGACATGCTGAGGCTGTTCGACTTCAACAAGCAGGCCATCCAGA
GGCTGAAGGCCGAGGCCCAGATGAGCATCCAGCTGATCAACAAGGCCGTGAACGCCCTGATCAACGACCAGCTGATCAT
GAAGAACCACCTGAGGGACATCATGGGCATCCCCTACTGCAACTACAGCAAGTACTGGTACCTGAACCACACCACCACC
GGCAGGACCAGCCTGCCCAAGTGCTGGCTGGTGAGCAACGGCAGCTACCTGAACGAGACCCACTTCAGCGACGACATCG
AGCAGCAGGCCGACAACATGATCACCGAGATGCTGCAGAAGGAGTACATGGAGAACCAGAGCGGCGGCAGCGGCGGCCT
GAGGTTCGGCATCGTGGCCAGCAGGGCCAACCACGCCCTGGTGGGCGGCAGCGGCGGCGCCGCCGCCAAGCCCGCCACC
ACCGAGGGCGAGTTCCCCGAGACCAGGGAGAAGATGAGCGGCATCAGGAGGGCCATCGCCAAGGCCATGGTGCACAGCA
AGCACACCGCCCCCCACGTGACCCTGATGGACGAGGCCGACGTGACCAAGCTGGTGGCCCACAGGAAGAAGTTCAAGGC
CATCGCCGCCGAGAAGGGCATCAAGCTGACCTTCCTGCCCTACGTGGTGAAGGCCCTGGTGAGCGCCCTGAGGGAGTAC
CCCGTGCTGAACACCAGCATCGACGACGAGACCGAGGAGATCATCCAGAAGCACTACTACAACATCGGCATCGCCGCCG
ACACCGACAGGGGCCTGCTGGTGCCCGTGATCAAGCACGCCGACAGGAAGCCCATCTTCGCCCTGGCCCAGGAGATCAA
CGAGCTGGCCGAGAAGGCCAGGGACGGCAAGCTGACCCCCGGCGAGATGAAGGGCGCCAGCTGCACCATCACCAACATC
GGCAGCGCCGGCGGCCAGTGGTTCACCCCCGTGATCAACCACCCCGAGGTGGCCATCCTGGGCATCGGCAGGATCGCCG
AGAAGCCCATCGTGAGGGACGGCGAGATCGTGGCCGCCCCCATGCTGGCCCTGAGCCTGAGCTTCGACCACAGGATGAT
CGACGGCGCCACCGCCCAGAAGGCCCTGAACCACATCAAGAGGCTGCTGAGCGACCCCGAGCTGCTGCTGATG
Underlined: antigen sequence
E2P nanoparticle scaffold plus contiguous cancer antigens
Cancer constructs below:
14. LS3_Gp100
MDWTWILFLVAAATRVHSLRFGIVASRANHALVGGSGGSGGSGGSGGGMDLVLKRCLL
HLAVIGALLAVGATKVPRNQDWLGVSRQLRTKAWNRQLYPEWTEAQRLDCWRGG
QVSLKVSNDGPTLIGANASFSIALNFPGSQKVLPDGQVIWVNNTIINGSQVWGGQPV
YPQETDDACIFPDGGPCPSGSWSQKRSFVYVWKTWGQYWQVLGGPVSGLSIGTGRA
MLGTHTMEVTVYHRRGSRSYVPLAHSSSAFTITDQVPFSVSVSQLRALDGGNKHFLR
NQPLTFALQLHDPSGYLAEADLSYTWDFGDSSGTLISRALVVTHTYLEPGPVTAQVV
LQAAIPLTSCGSSPVPGTTDGHRPTAEAPNTTAGQVPTTEVVGTTPGQAPTAEPSGTT
SVQVPTTEVISTAPVQMPTAESTGMTPEKVPVSEVMGTTLAEMSTPEATGMTPAEVS
IVVLSGTTAAQVTTTEWVETTARELPIPEPEGPDASSIMSTESITGSLGPLLDGTATLRL
VKR
DNA sequence
ATGGACTGGACCTGGATCCTGTTCCTGGTGGCCGCCGCCACCAGGGTGCACAGCCTGAGGTTCGGCATCGTGGCCAGCA
GGGCCAACCACGCCCTGGTGGGCGGCAGCGGCGGCAGCGGCGGCAGCGGCGGCAGCGGCGGCGGCATGGACCTGGTGCT
GAAGAGGTGCCTGCTGCACCTGGCCGTGATCGGCGCCCTGCTGGCCGTGGGCGCCACCAAGGTGCCCAGGAACCAGGAC
TGGCTGGGCGTGAGCAGGCAGCTGAGGACCAAGGCCTGGAACAGGCAGCTGTACCCCGAGTGGACCGAGGCCCAGAGGC
TGGACTGCTGGAGGGGCGGCCAGGTGAGCCTGAAGGTGAGCAACGACGGCCCCACCCTGATCGGCGCCAACGCCAGCTT
CAGCATCGCCCTGAACTTCCCCGGCAGCCAGAAGGTGCTGCCCGACGGCCAGGTGATCTGGGTGAACAACACCATCATC
AACGGCAGCCAGGTGTGGGGCGGCCAGCCCGTGTACCCCCAGGAGACCGACGACGCCTGCATCTTCCCCGACGGCGGCC
CCTGCCCCAGCGGCAGCTGGAGCCAGAAGAGGAGCTTCGTGTACGTGTGGAAGACCTGGGGCCAGTACTGGCAGGTGCT
GGGCGGCCCCGTGAGCGGCCTGAGCATCGGCACCGGCAGGGCCATGCTGGGCACCCACACCATGGAGGTGACCGTGTAC
CACAGGAGGGGCAGCAGGAGCTACGTGCCCCTGGCCCACAGCAGCAGCGCCTTCACCATCACCGACCAGGTGCCCTTCA
GCGTGAGCGTGAGCCAGCTGAGGGCCCTGGACGGCGGCAACAAGCACTTCCTGAGGAACCAGCCCCTGACCTTCGCCCT
GCAGCTGCACGACCCCAGCGGCTACCTGGCCGAGGCCGACCTGAGCTACACCTGGGACTTCGGCGACAGCAGCGGCACC
CTGATCAGCAGGGCCCTGGTGGTGACCCACACCTACCTGGAGCCCGGCCCCGTGACCGCCCAGGTGGTGCTGCAGGCCG
CCATCCCCCTGACCAGCTGCGGCAGCAGCCCCGTGCCCGGCACCACCGACGGCCACAGGCCCACCGCCGAGGCCCCCAA
CACCACCGCCGGCCAGGTGCCCACCACCGAGGTGGTGGGCACCACCCCCGGCCAGGCCCCCACCGCCGAGCCCAGCGGC
ACCACCAGCGTGCAGGTGCCCACCACCGAGGTGATCAGCACCGCCCCCGTGCAGATGCCCACCGCCGAGAGCACCGGCA
TGACCCCCGAGAAGGTGCCCGTGAGCGAGGTGATGGGCACCACCCTGGCCGAGATGAGCACCCCCGAGGCCACCGGCAT
GACCCCCGCCGAGGTGAGCATCGTGGTGCTGAGCGGCACCACCGCCGCCCAGGTGACCACCACCGAGTGGGTGGAGACC
ACCGCCAGGGAGCTGCCCATCCCCGAGCCCGAGGGCCCCGACGCCAGCAGCATCATGAGCACCGAGAGCATCACCGGCA
GCCTGGGCCCCCTGCTGGACGGCACCGCCACCCTGAGGCTGGTGAAGAGG
15. LS3_PSA
MDWTWILFLVAAATRVHSLRFGIVASRANHALVGGSGGSGGSGGSGGGIVGGWECEKHS
QPWQVLVASRGRAVCGGVLVHPQWVLTAAHCIRNKSVILLGRHSLFHPEDTGQVFQ
VSHSFPHPLYDMSLLKNRFLRPGDDSSHDLMLLRLSEPAELTDAVKVMDLPTQEPAL
GTTCYASGWGSIEPEEFLTPKKLQCVDLHVISNDVCAQVHPQKVTKFMLCAGRWTG
GKSTCSGDSGGPLVCNGVLQGITSWGSEPCALPERPSLYTKVVHYRKWIKDTIVANP
DNA sequence
ATGGACTGGACCTGGATCCTGTTCCTGGTGGCCGCCGCCACCAGGGTGCACAGCCTGAGGTTCGGCATCGTGGCCAGCA
GGGCCAACCACGCCCTGGTGGGCGGCAGCGGCGGCAGCGGCGGCAGCGGCGGCAGCGGCGGCGGCATCGTGGGCGGCTG
GGAGTGCGAGAAGCACAGCCAGCCCTGGCAGGTGCTGGTGGCCAGCAGGGGCAGGGCCGTGTGCGGCGGCGTGCTGGTG
CACCCCCAGTGGGTGCTGACCGCCGCCCACTGCATCAGGAACAAGAGCGTGATCCTGCTGGGCAGGCACAGCCTGTTCC
ACCCCGAGGACACCGGCCAGGTGTTCCAGGTGAGCCACAGCTTCCCCCACCCCCTGTACGACATGAGCCTGCTGAAGAA
CAGGTTCCTGAGGCCCGGCGACGACAGCAGCCACGACCTGATGCTGCTGAGGCTGAGCGAGCCCGCCGAGCTGACCGAC
GCCGTGAAGGTGATGGACCTGCCCACCCAGGAGCCCGCCCTGGGCACCACCTGCTACGCCAGCGGCTGGGGCAGCATCG
AGCCCGAGGAGTTCCTGACCCCCAAGAAGCTGCAGTGCGTGGACCTGCACGTGATCAGCAACGACGTGTGCGCCCAGGT
GCACCCCCAGAAGGTGACCAAGTTCATGCTGTGCGCCGGCAGGTGGACCGGCGGCAAGAGCACCTGCAGCGGCGACAGC
GGCGGCCCCCTGGTGTGCAACGGCGTGCTGCAGGGCATCACCAGCTGGGGCAGCGAGCCCTGCGCCCTGCCCGAGAGGC
CCAGCCTGTACACCAAGGTGGTGCACTACAGGAAGTGGATCAAGGACACCATCGTGGCCAACCCC
16. LS3_HER2
MDWTWILFLVAAATRVHSLRFGIVASRANHALVGGSGGSGGSGGSGGGTQVCTGTDMK
LRLPASPETHLDMLRHLYQGCQVVQGNLELTYLPTNASLSFLQDIQEVQGYVLIAHN
QVRQVPLQRLRIVRGTQLFEDNYALAVLDNGDPLNNTTPVTGASPGGLRELQLRSLT
EILKGGVLIQRNPQLCYQDTILWKDIFHKNNQLALTLIDTNRSRACHPCSPMCKGSRC
WGESSEDCQSLTRTVCAGGCARCKGPLPTDCCHEQCAAGCTGPKHSDCLACLHFNH
SGICELHCPALVTYNTDTFESMPNPEGRYTFGASCVTACPYNYLSTDVGSCTLVCPLH
NQEVTAEDGTQRCEKCSKPCARVCYGLGMEHLREVRAVTSANIQEFAGCKKIFGSL
AFLPESFDGDPASNTAPLQPEQLQVFETLEEITGYLYISAWPDSLPDLSVFQNLQVIRG
RILHNGAYSLTLQGLGISWLGLRSLRELGSGLALIHHNTHLCFVHTVPWDQLFRNPH
QALLHTANRPEDECVGEGLACHQLCARGHCWGPGPTQCVNCSQFLRGQECVEECR
VLQGLPREYVNARHCLPCHPECQPQNGSVTCFGPEADQCVACAHYKDPPFCVARCP
SGVKPDLSYMPIWKFPDEEGACQPCPINCTHSCVDLDDKGCPAEQRASPLT
DNA sequence
ATGGACTGGACCTGGATCCTGTTCCTGGTGGCCGCCGCCACCAGGGTGCACAGCCTGAGGTTCGGCATCGTGGCCAGCA
GGGCCAACCACGCCCTGGTGGGCGGCAGCGGCGGCAGCGGCGGCAGCGGCGGCAGCGGCGGCGGCACCCAGGTGTGCAC
CGGCACCGACATGAAGCTGAGGCTGCCCGCCAGCCCCGAGACCCACCTGGACATGCTGAGGCACCTGTACCAGGGCTGC
CAGGTGGTGCAGGGCAACCTGGAGCTGACCTACCTGCCCACCAACGCCAGCCTGAGCTTCCTGCAGGACATCCAGGAGG
TGCAGGGCTACGTGCTGATCGCCCACAACCAGGTGAGGCAGGTGCCCCTGCAGAGGCTGAGGATCGTGAGGGGCACCCA
GCTGTTCGAGGACAACTACGCCCTGGCCGTGCTGGACAACGGCGACCCCCTGAACAACACCACCCCCGTGACCGGCGCC
AGCCCCGGCGGCCTGAGGGAGCTGCAGCTGAGGAGCCTGACCGAGATCCTGAAGGGCGGCGTGCTGATCCAGAGGAACC
CCCAGCTGTGCTACCAGGACACCATCCTGTGGAAGGACATCTTCCACAAGAACAACCAGCTGGCCCTGACCCTGATCGA
CACCAACAGGAGCAGGGCCTGCCACCCCTGCAGCCCCATGTGCAAGGGCAGCAGGTGCTGGGGCGAGAGCAGCGAGGAC
TGCCAGAGCCTGACCAGGACCGTGTGCGCCGGCGGCTGCGCCAGGTGCAAGGGCCCCCTGCCCACCGACTGCTGCCACG
AGCAGTGCGCCGCCGGCTGCACCGGCCCCAAGCACAGCGACTGCCTGGCCTGCCTGCACTTCAACCACAGCGGCATCTG
CGAGCTGCACTGCCCCGCCCTGGTGACCTACAACACCGACACCTTCGAGAGCATGCCCAACCCCGAGGGCAGGTACACC
TTCGGCGCCAGCTGCGTGACCGCCTGCCCCTACAACTACCTGAGCACCGACGTGGGCAGCTGCACCCTGGTGTGCCCCC
TGCACAACCAGGAGGTGACCGCCGAGGACGGCACCCAGAGGTGCGAGAAGTGCAGCAAGCCCTGCGCCAGGGTGTGCTA
CGGCCTGGGCATGGAGCACCTGAGGGAGGTGAGGGCCGTGACCAGCGCCAACATCCAGGAGTTCGCCGGCTGCAAGAAG
ATCTTCGGCAGCCTGGCCTTCCTGCCCGAGAGCTTCGACGGCGACCCCGCCAGCAACACCGCCCCCCTGCAGCCCGAGC
AGCTGCAGGTGTTCGAGACCCTGGAGGAGATCACCGGCTACCTGTACATCAGCGCCTGGCCCGACAGCCTGCCCGACCT
GAGCGTGTTCCAGAACCTGCAGGTGATCAGGGGCAGGATCCTGCACAACGGCGCCTACAGCCTGACCCTGCAGGGCCTG
GGCATCAGCTGGCTGGGCCTGAGGAGCCTGAGGGAGCTGGGCAGCGGCCTGGCCCTGATCCACCACAACACCCACCTGT
GCTTCGTGCACACCGTGCCCTGGGACCAGCTGTTCAGGAACCCCCACCAGGCCCTGCTGCACACCGCCAACAGGCCCGA
GGACGAGTGCGTGGGCGAGGGCCTGGCCTGCCACCAGCTGTGCGCCAGGGGCCACTGCTGGGGCCCCGGCCCCACCCAG
TGCGTGAACTGCAGCCAGTTCCTGAGGGGCCAGGAGTGCGTGGAGGAGTGCAGGGTGCTGCAGGGCCTGCCCAGGGAGT
ACGTGAACGCCAGGCACTGCCTGCCCTGCCACCCCGAGTGCCAGCCCCAGAACGGCAGCGTGACCTGCTTCGGCCCCGA
GGCCGACCAGTGCGTGGCCTGCGCCCACTACAAGGACCCCCCCTTCTGCGTGGCCAGGTGCCCCAGCGGCGTGAAGCCC
GACCTGAGCTACATGCCCATCTGGAAGTTCCCCGACGAGGAGGGCGCCTGCCAGCCCTGCCCCATCAACTGCACCCACA
GCTGCGTGGACCTGGACGACAAGGGCTGCCCCGCCGAGCAGAGGGCCAGCCCCCTGACC

### EXAMPLES

### Example 1. Incorporation of a Novel CD4+ Helper Epitope Identified from Aquifex aeolicus Enhances Humoral Responses Induced by DNA and Protein Vaccinations

[0400] Synthetic DNA delivery by electroporation was previously used to mediate in vivo assembly of nanoparticle vaccines and it was observed that some nanoparticle scaffolding domains (used to promote self-assembly of scaffolded antigens) could induce CD4+ T-cell responses (Xu et al., 2020). Here, epitope mapping on several bacterial or viral scaffold protein domains was performed and it was determined that lumazine synthase (LS) from Aquifex aeolicus contained very potent CD4-helper epitopes for both BALB/c and C57BL/6 mice. LS can scaffold the assembly of 60 copies of HIV-priming antigen GT8, eOD-GT8-60mer, as well as other antigens (Jardine et al., 2016; Xu et al., 2020). In silico binding analysis determined that the identified C57BL/6 CD4-helper epitope (LS-3) was predicted also to have high binding affinity (<100 nM) to several common human MHC-II alleles (HLA-DRB1*07:01, HLA-DRB1*15:01 and HLA-DRB5*01:01). How this epitope might contribute to humoral immunity was determined by engineering mutations that knocked out binding of this epitope to murine HLA I-Ab (LS3KO) and it was observed that DNA-launched GT8-60mer nanoparticles containing this mutant epitope (DLnano_CD4MutLS_GT8) induced weaker antibody responses than the corresponding DNA-launched wild-type GT8-60mer nanoparticles (DLnano_LS_GT8). Finally, engineered fusion of the identified LS-3 epitope to a different antigen, hemagglutinin (HA) receptor binding domain (RBD) from influenza H1/CA/07/09 (LS3-CA09), improved humoral responses induced to HA by DNA and protein vaccinations. Overall, this study provides a relatively rigorous demonstration that simple fusion of a dominant CD4-helper epitope to a target antigen could improve humoral responses induced by either protein or DNA vaccines in animal models, and additionally describes the identification of a novel CD4-helper epitope from a bacterial enzyme, which may help inform the design of additional protein and DNA vaccines and be of translational importance.

[0401] 1. Materials and Methods

[0402] i. Structure Modeling and Design of CD4Mut_LS_GT8 Nanoparticles

[0403] Mutations to the LS-3 peptide were achieved using a structure-guided process. First, positions 14, 19, 22 and 24 in the LS domain were selected for mutation because they were making minimal contacts to the rest of the LS 1HQK crystal structure, which was hypothesized to have less detrimental effect on protein folding. Second, the ‘fixbb’ application of ROSETTA was used to computationally mutate the selected positions to each of the 20 amino acids allowing neighboring residues to change conformation. Mutations were selected which had similar or lower total score relative to the wild-type amino acid and by visual inspection of the resulting structural models. The mutations were R14K, A19G, A22F, A24G.

[0404] ii. DNA Design and Plasmid Synthesis

[0405] Protein sequences for IgE Leader Sequence and eOD-GT8-60mer were as previously reported (Briney et al., 2016; Xu et al., 2018). DNA encoding protein sequences were codon and RNA optimized as previously described (Xu et al., 2018). The optimized transgenes were synthesized de novo (GenScript) and cloned into a modified pVAX-1 backbone under the control of the human CMV promoter and bovine growth hormone polyadenylation signal.

[0406] iii. Production of His-Tagged LS3-CA09, LS3KO-CA09, or PADRE-CA09

[0407] Expi293F cells were transfected with pVAX plasmid vector carrying the His-Tagged LS3-CA09, LS3KO-CA09, PADRE-CA09, GT8-monomer, eOD-GT8-60mer or CD4Mut_LS_GT8-60mer transgene with PEI/OPTI-MEM and harvested 6 days post-transfection. Transfection supernatant was first purified with affinity chromatography using the AKTA pure 25 system and an IMAC Nickel column for His-Tagged constructs and gravity flow columns filled with GNL Lectin beads (for nanoparticles). The eluate fractions from the affinity purification were pooled, concentrated and dialyzed into 1×PBS buffer before being loaded onto the SEC column and then purified with size exclusion chromatography with the Superdex 200 10/300 GL column (GE Healthcare) for His-Tagged constructs, and with Superose 6 Increase 10/300 GL column for nanoparticles. Identified eluate fractions were then collected and concentrated to 1 mg/mL in PBS.

[0408] iv. Animals

[0409] All animal experiments were carried out in accordance with animal protocols 201214 and 201115 approved by the Wistar Institute Institutional Animal Care and Use Committee (IACUC). For DNA-based immunization, 6 to 8 week old female C57BL/6 or BALB/c mice (Jackson Laboratory) were immunized with DNA vaccines via intramuscular injections into the tibialis anterior muscles, coupled with intramuscular EP with the CELLECTRA 3P device (Inovio Pharmaceuticals). In experiments in FIG. 1A-1G and FIG. 3A-3F, mice were immunized twice with 25 μg DNA plasmid three weeks apart and euthanized two weeks post the second vaccination. In experiments in FIG. 4A-4J, mice were immunized twice with 25 μg DNA plasmid twice four weeks apart and euthanized one week post the second vaccination. For vaccinations involving recombinant protein, 6 to 8-week-old female C57BL/6 mice were immunized intramuscularly with 10 μg of recombinant LS3-CA09, LS3KO-CA09 or PADRE-CA09 protein in 15 μL sterile PBS co-formulated with 15 μL Sigma Adjuvant System (SigmaAldrich) in the tibialis anterior muscles three times four weeks apart and were euthanized one week post the third immunization.

[0410] v. HA-Binding ELISA

[0411] 96-well half area plates were coated at 4° C. overnight with 2 μg/mL of recombinant HA(ΔTM)(A/California/04/2009) (Immune Technology), and blocked at room temperature for 2 hours with a solution containing 1×PBS, 5% skim milk, 10% goat serum, 1% BSA, 1% FBS, and 0.2% Tween-20. The plates were subsequently incubated with serially diluted mouse sera at 37° C. for 2 hours, followed by 1-hour incubation with anti-mouse IgG H+L HRP (Bethyl) at 1:20,000 dilution at room temperature and developed with TMB substrate. Absorbance at 450 nm and 570 nm were recorded with BioTEK plate reader.

[0412] vi. Antigenic Profile Characterization of Purified eOD-GT8-60Mer and CD4Mut_LS_GT8-60mer

[0413] Corning half-area 96-well plates were coated with 2 μg/mL of purified eOD-GT8-60mer or CD4Mut_LS_GT8-60mer at 4° C. overnight. The plates were then blocked with the buffer as described above for 2 hours at room temperature, followed by incubation with serially diluted VRC01 at room temperature for 2 hours. The plates were then incubated with anti-human Fc (cross-adsorbed against rabbits and mice) (Jackson Immunoresearch) at 1:10,000 dilution for 1 hour, followed by addition of TMB substrate for detection. Absorbance at 450 nm and 570 nm were recorded with BioTEK plate reader.

[0414] vii. HAI Assay

[0415] Mice sera were treated with receptor-destroying enzyme (RDE, 1:3 ratio; SEIKEN) at 37° C. overnight for 18-20 hours followed by complement and enzyme inactivation at 56° C. for 45 minutes. RDE-treated sera were subsequently cross-adsorbed with 10% rooster red blood cells (Lampire Biologicals) in 0.9% saline at 4° C. for 1 hour. The cross-adsorbed sera were then serially diluted with PBS in a 96-well V-bottom microtiter plates (Corning). Four hemagglutinating doses (HAD) of A/California/07/2009 (H1N1)pdm09 (Virapur) were added to each well and the serum-virus mixture was incubated at room temperature for 1 hour. The mixture was then incubated with 50 μl 0.5% v/v rooster red blood cells in 0.9% saline for 30 minutes at room temperature. The HAI antibody titer was scored with the dot method, and the reciprocal of the highest dilution that did not cause agglutination of the rooster red blood cells was recorded.

[0416] viii. ELISpot Assay

[0417] Spleens from immunized mice were collected and homogenized into single cell suspension with a tissue stomacher in 10% FBS/1% Penicillin-streptomycin in RPMI 1640. Red blood cells were subsequently lysed with ACK lysing buffer (ThermoFisher) and percentage of viable cells were determined with Trypan Blue exclusion using Vi-CELL XR (Beckman Coulter). 200,000 cells were then plated in each well in the mouse IFNγ ELISpot plates (MabTech), followed by addition of peptide pools that span both the lumazine synthase, 3BVE, PfV or GT8 domains, or individual LS-3, LS3KO or PADRE peptides at 5 μg/mL of final concentration for each peptide (GenScript). The cells were then stimulated at 37° C. for 16-18 hours, followed by development according to the manufacturer's instructions. Spots for each well were then imaged and counted with ImmunoSpot Macro Analyzer.

[0418] ix. Intracellular Cytokine Staining

[0419] Single cell suspension from spleens of immunized animals were prepared as described before and stimulated with 5 μg/mL of peptides (GenScript) for 5 hours at 37° C. in the presence of 1:500 protein transport inhibitor (ThermoFisher). The cells were then incubated with live/dead for 10 minutes at room temperature, surface stains (anti-mouse CD4 BV510, anti-mouse CD8 APC-Cy7, anti-mouse CD44 AF700, anti-mouse CD62L BV771) (BD-Biosciences) at room temperature for 30 minutes. The cells were then fixed and permeabilized according to manufacturer's instructions for BD Cytoperm Cytofix kit and stained with intracellular stains anti-mouse IL-2 PE-Cy7, anti-mouse IFN-γ APC, anti-mouse CD3e PE-Cy5 and anti-mouse TNFa BV605 (BioLegend) at 4° C. for 1 hour. The cells were subsequently analyzed with LSR II 18-color flow cytometer.

[0420] x. Epitope Mapping

[0421] 15-mer peptides spanning the LS and GT8 domains of eOD-GT8-60mer (GenScript) were arranged into row and column pools (each peptide appears exactly once in the row pool and once in the column pool). Splenocytes from BALB/c or C57BL/6 immunized twice with 25 ug DLnano_LS_GT8 were co-incubated with each peptide pool with a final concentration of 5 μg/mL for each peptide overnight in IFNγ ELIspot plates (MabTech). The plates were then developed according to manufacturer's instruction, and peptides that can potentially stimulate T-cell responses were identified based on the combination of row and column pools that induce IFNγ responses. Responses to those peptides were then confirmed with ICS as described in the last section.

[0422] xi. Statistics

[0423] Power analysis was performed with R based on our preliminary data to determine the smallest sample size that would allow us to achieve a power of 0.9 with a pre-set α-value of 0.05. All statistical analyses were performed with PRISM V 8.2.1 and R V 3.5.1. Each individual data point was sampled independently. Two-tailed Mann Whitney Rank Tests were used to compare differences between groups. Bonferroni corrections were used to adjust for multiple comparisons.

[0424] 2. Results

[0425] i. Identification Novel Murine CD4-Helper Epitopes from the LS Domain of Aquifex aeolicus

[0426] It was previously observed that scaffold domains used to drive in vivo assembly of nanoparticle vaccines could sometimes induce CD4+ T-cell responses (Xu et al., 2020). Here, CD4+ T-cell responses elicited by various nanoparticle scaffolding domains, ferritin from Helicobacter pylori (3BVE), LS from Aquifex aeolicus, and the viral cage of Prototype Foamy Virus (PfV), were compared in BALB/c immunized with DNA-launched GT8 nanoparticle vaccines that incorporate these respective protein domains (DLnano_3BVE_GT8, DLnano_LS_GT8, DLnano_PfV_GT8) (FIG. 1A). All mice in the experiments were immunized twice with 25 μg DNA immunogens three weeks apart and were euthanized two weeks post the second vaccination, at the time point which corresponded to their peak cellular responses. Using intracellular cytokine staining (ICS) to analyze murine splenocytes stimulated with overlapping peptide pools that spanned the respective protein domains, it was determined that the LS domain elicited the most potent CD4+ T-cell responses (approximately 2% of CD3+CD4+CD62L-CD44+ T-cells were observed to IFNγ+ following peptide stimulation), followed by the PfV and the 3BVE domains. Importantly, DLnano_LS_GT8 vaccination elicited even more potent CD4+ T-cell responses to the LS domain in the C57BL/6 mice than in the BALB/c mice, as measured by expression of pro-inflammatory cytokines IFNγ, TNFα and IL-2 upon peptide stimulation (FIG. 1B). LS-specific poly-functional CD4+ T cell responses, as defined by the simultaneous expression of all three cytokines IFNγ, TNFα and IL-2, were induced in both the BALB/c and the C57BL/6 mice, accounting for approximately 1% and 3% of all CD3+CD4+CD62L-CD44+ T cells respectively (FIG. 1C). To identify the exact CD4-helper epitope in both the BABL/c and the C57BL/6 mice, a combination of an IFNγ ELIspot assay for screening and a flow-based ICS assay for confirmation was used. Two predominant non-overlapping CD4+ epitopes in the LS domain were observed for the BALB/c mice (LS-13: DAVIAIGVLCRGATP and LS-15: ATPSFDYIASEVSKG) (FIG. 1D and FIG. 1E), whereas a single dominant CD4+ epitope in the LS domain was observed for the C57BL/6 mice (LS-3: LRFGIVASRANHALV) (FIG. 1F and FIG. 1G). The overall CD4+ T-cell responses measured by ICS were lower in the mapping study than in the previous experiment (FIG. 1B, FIG. 1E and FIG. 1G), likely because while fresh splenocytes were used for ICS analysis previously (FIG. 1B), splenocytes were used 24 hours post-harvest in the mapping experiment due to the time required for the preliminary IFNγ ELIspot screen (FIG. 1E and FIG. 1G). Additional epitopes identified through the preliminary IFNγ ELIspot screen were also characterized (FIG. 5A and FIG. 5B) by ICS, and mapped the CD8+ T-cell responses to two GT8 peptides in the BALB/c mice (FIG. 5C and Table 1) and to one LS peptide in the C57BL/6 mice (FIG. 5D and Table 1).

TABLE 1
Identified CD4+ and CD8+ epitopes in the LS and GT8 domains in the BALB/c
and C57BL/6 mice immunized twice with 25 μg DLnano_LS_GT8 three weeks apart
and sacrificed two weeks post the second vaccination for cellular analysis.

| Strain | Category | Domain | Sequence | Classification |
|---|---|---|---|---|
| BALB/c | CD4 | Lumazine Synthase | DAVIAIGVLCRGATP | WT |
| | | Lumazine Synthase | ATPSFDYIASEVSKG | WT |
| | CD8 | GT8 | TRQGGYSNDNTVIFR | WT |
| | | GT8 | ARCQIAGTVVSTQLF | WT |
| C57BL/6 | CD4 | Lumazine Synthase | LRFGIVASRANHALV | WT |
| | | Lumazine Synthase | LKFGIVGSRFNHGLV | LS3KO |
| | CD8 | Lumazine Synthase | AALCAIEMANLFKSL | WT |

[0427] ii. Murine HLA-IAb Epitope was Predicted to have High Binding Affinity for Several Human MHC-II Alleles by in Silico Analysis

[0428] As the identified murine LS CD4-helper epitopes may or may not be conserved in humans, in silico analysis was used to predict the binding affinities of the identified LS-3, LS-13 and LS-15 epitopes to common human MHC-II alleles. Using a stabilization matrix method (SMM-align) and an artificial neural network-based method (NN-align) for alignment (Nielsen and Lund, 2009; Nielsen et al., 2007), the mapped murine C57BL/6 HLA-IAb epitope LS-3 demonstrated high binding affinity (<100 nM) for HLA-DRB1*07:01, HLA-DRB1*15:01 and HLA-DRB5*01:01, which correspond to human allele frequencies of 6.98%, 7.86%, and 14.6% respectively (Louthrenoo et al., 2013; Solberg et al., 2008), and moderate binding affinity (<1000 nM) for HLA-DRB1*03:01 and HLA-DRB4*01:01, which correspond to human allele frequencies of 6.76% and 35% respectively (Geng et al., 1995; Solberg et al., 2008). Low-to-moderate binding affinity (<5000 nM) was observed for LS-3 to the human allele HLA-DRB3*01:01 (FIG. 2A). Of note, both the NN-align and the SMM-align correctly predicted high binding affinities of the LS-3 epitope to murine HLA-IAb. In contrast, the identified murine BALB/c HLA-IAd epitopes LS-13 and LS-15 were predicted to have lower binding affinities to either human or murine HLA alleles than the LS-3 epitope (FIG. 2B). As such, since the LS-3 epitope was more likely to be conserved in humans, it was decided to further characterize the HLA-IAb LS-3 epitope rather than the HLA-IAd LS-13/LS-15 epitopes in the downstream experiments.

[0429] iii. Identified Murine LS-3 CD4+ Helper Epitope Supported the Induction of Potent Immune Responses by DLnano_LS_GT8

[0430] To determine whether CD4+ T-cell help provided by the identified LS-3 epitope can contribute to the induction of humoral immunity by DLnano_LS_GT8, a GT8 nanoparticle variant (DLnano_CD4MutLS_GT8) was engineered through a structure-guided design process in which the LS-3 epitope was selectively mutated to ablate its binding to HLA-IAb (as informed by the NN-align and the SMM-align based binding analysis). Care was taken, simultaneously, to avoid mutations that may disrupt nanoparticle assembly. 27% residues in the LS-3 epitope (4/15 residues) were mutated and the corresponding knockout epitope LS3-KO was generated (FIG. 3A and Table. 1), resulting in reduction of HLA-IAb binding affinity from 205 nM to 4261 nM by the SMM-align and 61.7 nM to 7668 nM by the NN-align. Whether the engineered variant DLnano_CD4MutLS_GT8 incorporating the LS3-KO epitope could still assemble homogenously was verified by expressing this new construct in vitro and performing size exclusion chromatography (SEC) of the lectin-column purified DLnano_CD4MutLS_GT8 transfection supernatant. SEC showed CD4MutLS_GT8 assembled homogenously into 60-mer (single peak observed on the SEC trace centering at 12.33 mL retention volume) similar to what we previously observed for the wildtype eOD-GT8-60mer (FIG. 3B) (Xu et al., 2020). Additionally, Size Exclusion Chromatography Multi Angle Light Scattering (SEC-MALs) analysis determined the molecular weight of CD4MutLS_GT8 to be around 2 Mda, close to the observed molecular weight of eOD-GT8-60mer (FIG. 6A) (Xu et al., 2020). The antigenic profiles of the engineered immunogens were examined and equivalent binding to VRC01, an HIV-1 broadly neutralizing antibody, was observed for eOD-GT8_60mer and CD4MutLS_GT8_60mer (FIG. 3C). ICS analyses of mice immunized with respective DNA-encoded constructs confirmed complete knockout of the LS-3 CD4+ helper epitope in the CD4MutLS_GT8 construct (FIG. 3D and FIG. 3E). Sera from animals seven d.p.i demonstrated significantly attenuated responses to GT8 in animals immunized with DLnano_CD4MutLS_GT8, though they still had stronger responses than those immunized with DNA-encoded GT8-monomer (FIG. 3F). Differences in humoral immunity induced by DLnano_LS_GT8 and DLnano_CD4MutLS_GT8 waned overtime; however, repeat vaccination of DLnano_LS_GT8 but not DLnano_CD4MutLS_GT8 at 21 d.p.i boosted the humoral immunity in mice (FIG. 6B). Taken together, this experiment suggests that the identified LS-3 CD4-helper epitope contributes to the overall antibody responses induced, as partial attenuation was observed when binding of this epitope to HLA IAb was knocked out.

[0431] iv. Engineered Fusion of LS-3 CD4+ Helper Epitope to CA09 HA-RBD Enhanced Anti-HA Antibody Responses Induced by DNA or Protein Vaccines

[0432] As it has determined that CD4+ T-cell help provided by the LS-3 epitope could contribute to the overall humoral responses, the next step is to determine if it can serve as a “molecular adjuvant” to enhance induced antibody responses by engineering fusion of the epitope with a different model antigen, CA09 HA-RBD. Either an LS3KO epitope, an LS3 epitope, or a PADRE epitope (AKFVAAWTLKAAA) was incorporated on the N-terminus of CA09 HA-RBD, downstream of the IgE leader sequence, which served as a secretion tag for the antigen (FIG. 4A). LS3KO-CA09 served as a better control to which responses induced by LS3-CA09 and PADRE-CA09 would be compared, as the impact of N-terminal peptide fusion on the immunogenicity of an antigen would be considered (protein sequences of LS3KO-CA09 and LS3-CA09 only differed at four residues). First, it was confirmed that DNA-encoded LS3-CA09 could induce CD4+ T-cell responses to the incorporated LS-3 epitope. Indeed, by ICS analysis, C57BL/6 mice immunized with DNA-encoded LS3-CA09 but not those immunized with LS3KO-CA09 were capable of mounting CD4+ T-cell responses to their respective incorporated epitope (FIG. 4B and FIG. 4C). The finding was similarly validated by IFNγ ELIspot analysis (FIG. 7A and FIG. 7B). Next, CD4+ T-cell responses induced by DNA-encoded LS3-CA09 and PADRE-CA09 were compared to those induced by the LS3 and PADRE epitopes, respectively. Both LS-3 and PADRE elicited potent CD4+ T-cell responses upon vaccination of DNA-encoded LS3-CA09 and PADRE-CA09 in C57BL/6 mice, with similar levels of cytokine responses induced as determined by ICS (FIG. 4D and FIG. 4E) and IFNγ ELIspot assays (FIG. 7C and FIG. 7D). Additionally, by ICS analysis, epitope-specific polyfunctional T-cell responses were also similar between the LS-3 and PADRE epitopes (FIG. 4F).

[0433] Next, the humoral responses induced by two vaccinations of DNA-encoded LS3KO-CA09, LS3-CA09 and PADRE-CA09 were compared to the humoral responses induced by CA09 HA over time. By ELISA analysis, both DNA-encoded LS3-CA09 and PADRE-CA09 improved induced binding antibody responses to HA as compared to DNA-encoded LS3KO-CA09 prior to and after the boost, with approximately 9.5-fold and 5-fold improvements observed for DNA-encoded LS3-CA09 and PADRE-CA09 respectively (FIG. 4G). Most importantly, it was observed that functional antibody responses, as measured by the hemagglutination inhibition (HAI) titers, were significantly improved for DNA-encoded LS3-CA09 relative to LS3KO-CA09 after the second vaccination (with a mean titer of 126 versus 21, respectively) (FIG. 4H). DNA-encoded PADRE-CA09, on the other hand, did not significantly improve the HAI titers relative to DNA-encoded LS3KO-CA09 after the first or the second vaccination (FIG. 4H).

[0434] Whether the observed phenomenon can be generalized to other routes of vaccination, such as protein vaccines, was further determined. C-terminal His-tagged LS3KO-CA09, LS3-CA09 and PADRE-CA09 were expressed in vitro and purified from Expi293F cell transfection supernatant with nickel column. C57BL/6 mice were subsequently immunized with 10 μg recombinant protein LS3KO-CA09, LS3-CA09 or PADRE-CA09 co-formulated with RIBI each time. Humoral and cellular responses induced by protein vaccination were observed to be considerably lower than those induced by DNA vaccinations (FIG. 4G and FIG. 4I), such that three protein vaccinations at Weeks 0, 4 and 8 were required to observed robust humoral responses. Epitope-specific CD4+ T-cell responses induced by protein vaccinations were considerably lower than that by DNA vaccines. However, CD4+ T-cell responses directed at the LS-3 epitope could still be observed by ICS (FIG. 7E) and by IFNγ ELIspot (FIG. 7F and FIG. 7G). CD4+ T-cell responses to PADRE were not observed (FIG. 7E, FIG. 7F and FIG. 7G), likely as a result of the sensitivity of detection of the assays. Regardless, it was observed that HA-binding antibody titers induced by both protein LS3-CA09 and PADRE-CA09 vaccinations were significantly higher (100% sero-conversion in both groups) relative to protein LS3KO-CA09 vaccination, for which 20% sero-conversion (1/5 mice) was observed (FIG. 4I). Lastly, similar to what was observed for DNA-vaccinations, protein LS3-CA09 vaccination induced significantly improved HAI titers post-dose 3 relative to protein LS3KO-CA09 vaccination (with a mean titer of 169 versus 32, respectively). Protein PADRE-CA09 vaccination, on the other hand, was not observed to induce significantly improved HAI titers (FIG. 4J). Taken together, the data suggest that the engineered fusion of the identified LS-3 CD4+ helper epitope to a model antigen can significantly enhance humoral responses to that antigen. Additionally, the incorporation of the LS-3 epitope performed as well as, if not better than, the incorporation of the PADRE epitope in terms of adjuvating humoral responses.

[0435] 3. Discussion

[0436] The importance of CD4+ T-cell help in facilitating antibody maturation and class-switching is well-established (Crum-Cianflone and Wallace, 2014). AIDS patients with low CD4+ T-cell count cannot mount effective antibody responses with vaccination. Similarly, laboratory animals that receive transient CD4+ T-cell depletion also cannot develop strong antibody responses to a foreign gene or an antigen (Duperret et al., 2018; Wise et al., 2020). Both secreted soluble cytokine factors as well as surface-displayed ligands from Tfh cells are indispensable to the survival, AID-dependent somatic hypermutation and proliferation of GCB cells, and are necessary for the generation of antibody-secreting plasma cells and long-lived memory B cells (Crotty, 2015).

[0437] While larger antigenic protein domains likely harbor CD4+ T-cell epitopes that can be restricted by the host HLA alleles for the induction of Tfh responses, carbohydrate and peptide vaccines are intrinsically minimalistic and unlikely to contain potent CD4+ T-cell help epitopes (Astronomo and Burton, 2010). Additionally, domain minimization has now become an increasingly important approach in protein engineering and vaccinology, as researchers begin to appreciate the importance of focusing elicited B-cell responses to certain target epitopes by designing protein mini-domain devoid of distracting immunodominant surfaces (van der Lubbe et al., 2018; Yassine et al., 2015). However, these mini-proteins contain fewer overlapping peptides, and therefore statistically will be less likely to harbor potent HLA-restricted CD4+ helper epitopes. As such, several studies have explored conjugation of these carbohydrate, peptide, or mini-protein vaccines to carrier proteins, including but not limited to KLH, tetanus toxin and HbsAg. Induction of more potent antibody responses was observed in many cases (Jin et al., 2017; Marini et al., 2019). However, this approach may undermine the core motivations behind domain minimization by introducing a host of immunodominant distracting surfaces which may skew induced humoral responses.

[0438] Conjugation of the antigen with a shorter conserved CD4+ T-cell epitope may offer a promising alternative to conjugation with a whole protein carrier. As the CD4+ T-cell epitope is intrinsically shorter (12-16 amino acid long), it will less represent a distracting immunodominant surface (Hemmer et al., 2000). Additionally, they may alternatively be used as short linker to connect different protein domains, such as to cross-link a nanoparticle protein scaffold with a target antigen to promote vaccine antigen self-assembly (He et al., 2018). Fusing antigen with the PADRE epitope has been demonstrated to improve antibody responses in several animal studies and has also been explored in the clinic (clinical trials NCT01972737 and NCT02264236) (Rosa et al., 2004). Additional CD4+ helper epitopes have also been mapped and explored. For example, a recent study reported that co-delivery of MPER antigen with a Leishmania major derived HLA I-Ad helper CD4+ T-cell epitope (LACK) in liposomes can improve induced anti-MPER antibody responses (Elbahnasawy et al., 2018).

[0439] This study reported that the identification and characterization of a novel HLA I-Ab epitope LS-3 from the LS domain of Aquifex aeolicus, which is also the protein domain that can be used to scaffold the assembly of a 60-mer nanoparticle. In silico analysis predicted the LS-3 epitope to have high binding affinity to several common human HLA alleles, particularly HLA-DRB1*07:01, HLA-DRB1*15:01 and HLA-DRB5*01:01. Epitope knockout experiment demonstrated that CD4+ T-cell help provided by this epitope could indeed contribute to the overall antibody responses. Finally, engineered genetic fusion of the LS-3 epitope with a different target antigen CA09 HA-RBD (LS3-CA09) significantly increased binding and HAI antibody titers elicited by protein and DNA vaccinations to HA as compared to the control antigen, LS3KO-CA09. The study demonstrates the potential utility in this epitope as a “molecular adjuvant” to increase vaccine-induced antibody responses, in both preclinical murine studies as well as possibly in translational vaccine trials.

### REFERENCES

[0440] 1. Alexander, J., del Guercio, M. F., Maewal, A., Qiao, L., Fikes, J., Chesnut, R. W., Paulson, J., Bundle, D. R., DeFrees, S., and Sette, A. (2000). Linear PADRE T helper epitope and carbohydrate B cell epitope conjugates induce specific high titer IgG antibody responses. J Immunol 164, 1625-1633.
[0441] 2. Andreatta, M., Karosiene, E., Rasmussen, M., Stryhn, A., Buus, S., and Nielsen, M. (2015). Accurate pan-specific prediction of peptide-MHC class II binding affinity with improved binding core identification. Immunogenetics 67, 641-650.
[0442] 3. Astronomo, R. D., and Burton, D. R. (2010). Carbohydrate vaccines: developing sweet solutions to sticky situations? Nat Rev Drug Discov 9, 308-324.
[0443] 4. Briney, B., Sok, D., Jardine, J. G., Kulp, D. W., Skog, P., Menis, S., Jacak, R., Kalyuzhniy, O., de Val, N., Sesterhenn, F., et al. (2016). Tailored Immunogens Direct Affinity Maturation toward HIV Neutralizing Antibodies. Cell 166, 1459-1470 e1411.
[0444] 5. Burton, D. R., and Hangartner, L. (2016). Broadly Neutralizing Antibodies to HIV and Their Role in Vaccine Design. Annu Rev Immunol 34, 635-659.
[0445] 6. Carrasco, Y. R., Fleire, S. J., Cameron, T., Dustin, M. L., and Batista, F. D. (2004). LFA-1/ICAM-1 interaction lowers the threshold of B cell activation by facilitating B cell adhesion and synapse formation. Immunity 20, 589-599.
[0446] 7. Clem, A. S. (2011). Fundamentals of vaccine immunology. J Glob Infect Dis 3, 73-78.
[0447] 8. Collins, K. A., Snaith, R., Cottingham, M. G., Gilbert, S. C., and Hill, A. V. S. (2017). Enhancing protective immunity to malaria with a highly immunogenic virus-like particle vaccine. Sci Rep 7, 46621.
[0448] 9. Corti, D., and Lanzavecchia, A. (2013). Broadly neutralizing antiviral antibodies. Annu Rev Immunol 31, 705-742.
[0449] 10. Crotty, S. (2014). T follicular helper cell differentiation, function, and roles in disease. Immunity 41, 529-542.
[0450] 11. Crotty, S. (2015). A brief history of T cell help to B cells. Nat Rev Immunol 15, 185-189.
[0451] 12. Crum-Cianflone, N. F., and Wallace, M. R. (2014). Vaccination in HIV-infected adults. AIDS Patient Care STDS 28, 397-410.
[0452] 13. Diethelm-Okita, B. M., Okita, D. K., Banaszak, L., and Conti-Fine, B. M. (2000). Universal epitopes for human CD4+ cells on tetanus and diphtheria toxins. J Infect Dis 181, 1001-1009.
[0453] 14. Duperret, E. K., Trautz, A., Stoltz, R., Patel, A., Wise, M. C., Perales-Puchalt, A., Smith, T., Broderick, K. E., Masteller, E., Kim, J. J., et al. (2018). Synthetic DNA-Encoded Monoclonal Antibody Delivery of Anti-CTLA-4 Antibodies Induces Tumor Shrinkage In Vivo. Cancer Res 78, 6363-6370.
[0454] 15. Elbahnasawy, M. A., Donius, L. R., Reinherz, E. L., and Kim, M. (2018). Co-delivery of a CD4 T cell helper epitope via covalent liposome attachment with a surface-arrayed B cell target antigen fosters higher affinity antibody responses. Vaccine 36, 6191-6201.
[0455] 16. Elgueta, R., Benson, M. J., de Vries, V. C., Wasiuk, A., Guo, Y., and Noelle, R. J. (2009). Molecular mechanism and function of CD40/CD40L engagement in the immune system. Immunol Rev 229, 152-172.
[0456] 17. Falugi, F., Petracca, R., Mariani, M., Luzzi, E., Mancianti, S., Carinci, V., Melli, M. L., Finco, O., Wack, A., Di Tommaso, A., et al. (2001). Rationally designed strings of promiscuous CD4(+) T cell epitopes provide help to Haemophilus influenzae type b oligosaccharide: a model for new conjugate vaccines. Eur J Immunol 31, 3816-3824.
[0457] 18. Flynn, S., Toellner, K. M., Raykundalia, C., Goodall, M., and Lane, P. (1998). CD4 T cell cytokine differentiation: the B cell activation molecule, OX40 ligand, instructs CD4 T cells to express interleukin 4 and upregulates expression of the chemokine receptor, Blr-1. J Exp Med 188, 297-304.
[0458] 19. Geng, L., Imanishi, T., Tokunaga, K., Zhu, D., Mizuki, N., Xu, S., Geng, Z., Gojobori, T., Tsuji, K., and Inoko, H. (1995). Determination of HLA class II alleles by genotyping in a Manchu population in the northern part of China and its relationship with Han and Japanese populations. Tissue Antigens 46, 111-116.
[0459] 20. Ghaffari-Nazari, H., Tavakkol-Afshari, J., Jaafari, M. R., Tahaghoghi-Hajghorbani, S., Masoumi, E., and Jalali, S. A. (2015). Improving Multi-Epitope Long Peptide Vaccine Potency by Using a Strategy that Enhances CD4+T Help in BALB/c Mice. PLoS One 10, e0142563.
[0460] 21. Ghosh, M., Solanki, A. K., Roy, K., Dhoke, R. R., Ashish, and Roy, S. (2013). Carrier protein influences immunodominance of a known epitope: implication in peptide vaccine design. Vaccine 31, 4682-4688.
[0461] 22. He, L., Kumar, S., Allen, J. D., Huang, D., Lin, X., Mann, C. J., Saye-Francisco, K. L., Copps, J., Sarkar, A., Blizard, G. S., et al. (2018). HIV-1 vaccine design through minimizing envelope metastability. Sci Adv 4, eaau6769.
[0462] 23. Hemmer, B., Kondo, T., Gran, B., Pinilla, C., Cortese, I., Pascal, J., Tzou, A., McFarland, H. F., Houghten, R., and Martin, R. (2000). Minimal peptide length requirements for CD4(+) T cell clones—implications for molecular mimicry and T cell survival. Int Immunol 12, 375-383.
[0463] 24. Jardine, J. G., Kulp, D. W., Havenar-Daughton, C., Sarkar, A., Briney, B., Sok, D., Sesterhenn, F., Ereno-Orbea, J., Kalyuzhniy, O., Deresa, I., et al. (2016). HIV-1 broadly neutralizing antibody precursor B cells revealed by germline-targeting immunogen. Science 351, 1458-1463.
[0464] 25. Jiang, S., Hillyer, C., and Du, L. (2020). Neutralizing Antibodies against SARS-CoV-2 and Other Human Coronaviruses. Trends Immunol.
[0465] 26. Jin, C., Gibani, M. M., Moore, M., Juel, H. B., Jones, E., Meiring, J., Harris, V., Gardner, J., Nebykova, A., Kerridge, S. A., et al. (2017). Efficacy and immunogenicity of a Vi-tetanus toxoid conjugate vaccine in the prevention of typhoid fever using a controlled human infection model of Salmonella Typhi: a randomised controlled, phase 2b trial. Lancet 390, 2472-2480.
[0466] 27. Kageyama, R., Cannons, J. L., Zhao, F., Yusuf, I., Lao, C., Locci, M., Schwartzberg, P. L., and Crotty, S. (2012). The receptor Ly108 functions as a SAP adaptor-dependent on-off switch for T cell help to B cells and NKT cell development. Immunity 36, 986-1002.
[0467] 28. Kurdi, A. T., Glavey, S. V., Bezman, N. A., Jhatakia, A., Guerriero, J. L., Manier, S., Moschetta, M., Mishima, Y., Roccaro, A., Detappe, A., et al. (2018). Antibody-Dependent Cellular Phagocytosis by Macrophages is a Novel Mechanism of Action of Elotuzumab. Mol Cancer Ther 17, 1454-1463.
[0468] 29. Kwong, P. D., Mascola, J. R., and Nabel, G. J. (2013). Broadly neutralizing antibodies and the search for an HIV-1 vaccine: the end of the beginning. Nat Rev Immunol 13, 693-701.
[0469] 30. Laursen, N. S., Friesen, R. H. E., Zhu, X., Jongeneelen, M., Blokland, S., Vermond, J., van Eijgen, A., Tang, C., van Diepen, H., Obmolova, G., et al. (2018). Universal protection against influenza infection by a multidomain antibody to influenza hemagglutinin. Science 362, 598-602.
[0470] 31. Louthrenoo, W., Kasitanon, N., Wichainun, R., Wangkaew, S., Sukitawut, W., Ohnogi, Y., Hong, G. H., Kuwata, S., and Takeuchi, F. (2013). The genetic contribution of HLA-DRB5*01:01 to systemic lupus erythematosus in Thailand. Int J Immunogenet 40, 126-130.
[0471] 32. Marini, A., Zhou, Y., Li, Y., Taylor, I. J., Leneghan, D. B., Jin, J., Zaric, M., Mekhaiel, D., Long, C. A., Miura, K., et al. (2019). A Universal Plug-and-Display Vaccine Carrier Based on HBsAg VLP to Maximize Effective Antibody Response. Front Immunol 10, 2931.
[0472] 33. Nielsen, M., and Lund, O. (2009). NN-align. An artificial neural network-based alignment algorithm for MHC class II peptide binding prediction. BMC Bioinformatics 10, 296.
[0473] 34. Nielsen, M., Lundegaard, C., and Lund, O. (2007). Prediction of MHC class II binding affinity using SMM-align, a novel stabilization matrix alignment method. BMC Bioinformatics 8, 238.
[0474] 35. Pichichero, M. E. (2013). Protein carriers of conjugate vaccines: characteristics, development, and clinical trials. Hum Vaccin Immunother 9, 2505-2523.
[0475] 36. Ragupathi, G., Cappello, S., Yi, S. S., Canter, D., Spassova, M., Bommann, W. G., Danishefsky, S. J., and Livingston, P. O. (2002). Comparison of antibody titers after immunization with monovalent or tetravalent KLH conjugate vaccines. Vaccine 20, 1030-1038.
[0476] 37. Rosa, D. S., Tzelepis, F., Cunha, M. G., Soares, I. S., and Rodrigues, M. M. (2004). The pan HLA DR-binding epitope improves adjuvant-assisted immunization with a recombinant protein containing a malaria vaccine candidate. Immunol Lett 92, 259-268.
[0477] 38. Seidel, U. J., Schlegel, P., and Lang, P. (2013). Natural killer cell mediated antibody-dependent cellular cytotoxicity in tumor immunotherapy with therapeutic antibodies. Front Immunol 4, 76.
[0478] 39. Snook, A. E., Baybutt, T. R., Xiang, B., Abraham, T. S., Flickinger, J. C., Jr., Hyslop, T., Zhan, T., Kraft, W. K., Sato, T., and Waldman, S. A. (2019). Split tolerance permits safe Ad5-GUCY2C-PADRE vaccine-induced T-cell responses in colon cancer patients. J Immunother Cancer 7, 104.
[0479] 40. Solberg, O. D., Mack, S. J., Lancaster, A. K., Single, R. M., Tsai, Y., Sanchez-Mazas, A., and Thomson, G. (2008). Balancing selection and heterogeneity across the classical human leukocyte antigen loci: a meta-analytic review of 497 population studies. Hum Immunol 69, 443-464.
[0480] 41. Valea, I., Adjei, S., Usuf, E., Traore, O., Ansong, D., Tinto, H., Owusu Boateng, H., Leach, A., Mwinessobaonfou Some, A., Buabeng, P., et al. (2018). Immune response to the hepatitis B antigen in the RTS,S/AS01 malaria vaccine, and co-administration with pneumococcal conjugate and rotavirus vaccines in African children: A randomized controlled trial. Hum Vaccin Immunother 14, 1489-1500.
[0481] 42. van der Lubbe, J. E. M., Verspuij, J. W. A., Huizingh, J., Schmit-Tillemans, S. P. R., Tolboom, J., Dekking, L., Kwaks, T., Brandenburg, B., Meijberg, W., Zahn, R. C., et al. (2018). Mini-HA Is Superior to Full Length Hemagglutinin Immunization in Inducing Stem-Specific Antibodies and Protection Against Group 1 Influenza Virus Challenges in Mice. Front Immunol 9, 2350.
[0482] 43. van Erp, E. A., Luytjes, W., Ferwerda, G., and van Kasteren, P. B. (2019). Fc-Mediated Antibody Effector Functions During Respiratory Syncytial Virus Infection and Disease. Front Immunol 10, 548.
[0483] 44. Wise, M. C., Xu, Z., Tello-Ruiz, E., Beck, C., Trautz, A., Patel, A., Elliott, S. T., Chokkalingam, N., Kim, S., Kerkau, M. G., et al. (2020). In vivo delivery of synthetic DNA-encoded antibodies induces broad HIV-1-neutralizing activity. J Clin Invest.
[0484] 45. Xu, Z., and Kulp, D. W. (2019). Protein engineering and particulate display of B-cell epitopes to facilitate development of novel vaccines. Curr Opin Immunol 59, 49-56.
[0485] 46. Xu, Z., Wise, M. C., Choi, H., Perales-Puchalt, A., Patel, A., Tello-Ruiz, E., Chu, J. D., Muthumani, K., and Weiner, D. B. (2018). Synthetic DNA delivery by electroporation promotes robust in vivo sulfation of broadly neutralizing anti-HIV immunoadhesin eCD4-Ig. EBioMedicine 35, 97-105.
[0486] 47. Xu, Z., Wise, M. C., Chokkalingam, N., Walker, S., Tello-Ruiz, E., Elliott, S. T. C., Perales-Puchalt, A., Xiao, P., Zhu, X., Pumroy, R. A., et al. (2020). In Vivo Assembly of Nanoparticles Achieved through Synergy of Structure-Based Protein Engineering and Synthetic DNA Generates Enhanced Adaptive Immunity. Adv Sci (Weinh) 7, 1902802.
[0487] 48. Yassine, H. M., Boyington, J. C., McTamney, P. M., Wei, C. J., Kanekiyo, M., Kong, W. P., Gallagher, J. R., Wang, L., Zhang, Y., Joyce, M. G., et al. (2015). Hemagglutinin-stem nanoparticles generate heterosubtypic influenza protection. Nat Med 21, 1065-1070.
[0488] 49. Zhang, X., Ing, S., Fraser, A., Chen, M., Khan, O., Zakem, J., Davis, W., and Quinet, R. (2013). Follicular helper T cells: new insights into mechanisms of autoimmune diseases. Ochsner J 13, 131-139.

1. A composition comprising: (i) an expressible nucleic acid sequence encoding an adjuvant peptide comprising an HLA I-Ab epitope from Aquifex aeolicus or a functional fragment thereof; or (ii) an amino acid sequence comprising an adjuvant peptide comprising an HLA I-Ab epitope from Aquifex aeolicus or a functional fragment thereof; wherein the adjuvant peptide is no more than about 1000 amino acids.

2. The composition of claim 1, wherein the HLA I-Ab epitope is no more than about 15 amino acids.

3. The composition of claim 1, wherein the adjuvant peptide is capable of binding HLA-DRB1*07:01, HLA-DRB1*15:01 and HLA-DRB5*01:01.

4. (canceled)

5. The composition of claim 1, wherein the nucleic acid sequence encoding the HLA I-Ab epitope comprises at least about 70% sequence identity to SEQ ID NO:2.

6. The composition of claim 1, wherein the expressible nucleic acid comprises a nucleic acid sequence that encodes a viral antigen or a cancer antigen, or wherein the amino acid comprises a viral antigen or a cancer antigen.

7. The composition of claim 6, wherein the viral antigen comprises a Coronaviridae antigen, Respiratory syncytial virus (RSV) antigen, Influenza antigen.

8.-19. (canceled)

20. The composition of claim 1, wherein the expressible nucleic acid sequence encodes an amino acid sequence comprising, from amino terminal to carboxy terminal orientation, the adjuvant peptide, a linker domain, and a viral and/or cancer antigen.

21. A pharmaceutical composition comprising: (i) a therapeutically or prophylactically effective amount of the expressible nucleic acid sequence of claim 1; or a therapeutically or prophylactically effective amount of the amino acid sequence of claim 1; and (ii) a pharmaceutically acceptable carrier.

22. A method of inducing an immune response in a subject comprising administering to the subject the pharmaceutical composition of claim 21.

23. A method of treating a viral infection or cancer in a subject in need thereof comprising administering to the subject the pharmaceutical composition of claim 21.

24. (canceled)

25. A method of activating and/or improving the antigen-specific immune response of a vaccine in a subject in need thereof comprising administering a therapeutically effective amount of the pharmaceutical composition of claim 21 to the subject.

26. The method of claim 23, wherein the viral infection is a Coronaviridae infection, RSV infection, or Influenza infection.

27. The method of claim 23, wherein the cancer is skin cancer, breast cancer or prostate cancer.

28. The method of claim 23, wherein the viral infection is COVID-19 infection.

29. The method of claim 23, wherein the cancer is melanoma.

30. The method of claim 23, wherein the cancer is HER2-breast cancer.

31. The method of claim 23, wherein the cancer is prostate cancer characterized by elevated PSA numbers as compared to a control subject.

32. A nucleic acid vaccine comprising an expressible nucleic acid sequence comprising SEQ ID NO:2 or a functional fragment or variant thereof that comprises at least 70% sequence identity to SEQ ID NO:2.

33. The nucleic acid vaccine of claim 32, wherein the expressible nucleic acid sequence further comprises, a linker, a leader sequence and a nucleic acid sequence encoding an antigen.

The application's sequence listing, which the Patent Office published only in electronic form, follows.

SEQUENCE LISTING (219 sequences)

SEQ ID NO: 1 - protein, 15 aa, Unknown
  Description of Unknown: Epitope sequence
LRFGIVASRANHALV

SEQ ID NO: 2 - DNA, 45 bp, Artificial Sequence
  Description of Artificial Sequence: Synthetic oligonucleotide
ctgaggttcggcatcgtggccagcagggccaaccacgccctggtg

SEQ ID NO: 3 - DNA, 54 bp, Artificial Sequence
  Description of Artificial Sequence: Synthetic oligonucleotide
atggattggacttggattctgttcctggtcgcagcagccacacgagtgcatagc

SEQ ID NO: 4 - DNA, 54 bp, Artificial Sequence
  Description of Artificial Sequence: Synthetic oligonucleotide
atggactggacctggattctgttcctggtggccgccgccacaagggtgcacagc

SEQ ID NO: 5 - protein, 19 aa, Artificial Sequence
  Description of Artificial Sequence: Synthetic peptide
MDWTWRILFLVAAATGTHA

SEQ ID NO: 6 - DNA, 132 bp, Artificial Sequence
  Description of Artificial Sequence: Synthetic polynucleotide
atggactggacctggagaatcctgttcctggtggccgccgccaccggcacacacgccgatacacacttccccatctgcatcttttgctgtggctgttgccataggtccaagtgtgggatgtgctgcaaaact

SEQ ID NO: 7 - DNA, 462 bp, Artificial Sequence
  Description of Artificial Sequence: Synthetic polynucleotide
atgcagatctacgaaggaaaactgaccgctgagggactgaggttcggaattgtcgcaagccgcgcgaatcacgcactggtggataggctggtggaaggcgctatcgacgcaattgtccggcacggcgggagagaggaagacatcacactggtgagagtctgcggcagctgggagattcccgtggcagctggagaactggctcgaaaggaggacatcgatgccgtgatcgctattggggtcctgtgccgaggagcaactcccagcttcgactacatcgcctcagaagtgagcaaggggctggctgatctgtccctggagctgaggaaacctatcacttttggcgtgattactgccgacaccctggaacaggcaatcgaggcggccggcacctgccatggaaacaaaggctgggaagcagccctgtgcgctattgagatggcaaatctgttcaaatctctgcga

SEQ ID NO: 8 - protein, 154 aa, Artificial Sequence
  Description of Artificial Sequence: Synthetic polypeptide
MQIYEGKLTAEGLRFGIVASRANHALVDRLVEGAIDAIVRHGGREEDITLVRVCGSWEIPVAAGELARKEDIDAVIAIGVLCRGATPSFDYIASEVSKGLADLSLELRKPITFGVITADTLEQAIEAAGTCHGNKGWEAALCAIEMANLFKSLR

SEQ ID NO: 9-20 - skipped (12 entries)

SEQ ID NO: 21 - DNA, 45 bp, Artificial Sequence
  Description of Artificial Sequence: Synthetic oligonucleotide
ggaggctccggaggatctggagggagtggaggctcaggaggaggc

SEQ ID NO: 22 - protein, 15 aa, Artificial Sequence
  Description of Artificial Sequence: Synthetic peptide
GGSGGSGGSGGSGGG

SEQ ID NO: 23 - protein, 9 aa, Artificial Sequence
  Description of Artificial Sequence: Synthetic peptide
GGSGGSGGS

SEQ ID NO: 24 - protein, 12 aa, Artificial Sequence
  Description of Artificial Sequence: Synthetic peptide
GGSGGSGGSGGS

SEQ ID NO: 25 - protein, 24 aa, Artificial Sequence
  Description of Artificial Sequence: Synthetic peptide
GGSGGSGGSGGSGGGGSGGGSGGG

SEQ ID NO: 26 - protein, 241 aa, Artificial Sequence
  Description of Artificial Sequence: Synthetic polypeptide
NEDDMKKLYKQMVQELEKARDRMEKLYKEMVELIQKAIELMRKIFQEVKQEVEKAIEEMKKLYDEAKKKIEQMIQQIKQGGDKQKMEELLKRAKEEMKKVKDKMEKLLEKLKQIMQEAKQKMEKLLKQLKEEMKKMKEKMEKLLKEMKQRMEEVKKKMDGDDELLEKIKKNIDDLKKIAEDLIKKAEENIKEAKKIAEQLVKRAKQLIEKAKQVAEELIKKILQLIEKAKEIAEKVLKGLE

SEQ ID NO: 27 - DNA, 72 bp, Artificial Sequence
  Description of Artificial Sequence: Synthetic oligonucleotide
ggcggctctggcggaagtggcggaagtgggggaagtggaggcggcggaagcgggggaggcagcgggggaggg

SEQ ID NO: 28 - DNA, 27 bp, Artificial Sequence
  Description of Artificial Sequence: Synthetic oligonucleotide
ggcggaagcggcggaagcggcgggtct

SEQ ID NO: 29 - DNA, 36 bp, Artificial Sequence
  Description of Artificial Sequence: Synthetic oligonucleotide
ggcggcagcggcggcagcggcgggagcggaggaagt

SEQ ID NO: 30 - DNA, 72 bp, Artificial Sequence; identical to SEQ ID NO: 27
  Description of Artificial Sequence: Synthetic oligonucleotide

SEQ ID NO: 31 - DNA, 42 bp, Artificial Sequence
  Description of Artificial Sequence: Synthetic oligonucleotide
tctcacagcggctccggcggctctggcagcggcggccacgcc

SEQ ID NO: 32 - protein, 14 aa, Artificial Sequence
  Description of Artificial Sequence: Synthetic peptide
SHSGSGGSGSGGHA

SEQ ID NO: 33 - DNA, 18 bp, Artificial Sequence
  Description of Artificial Sequence: Synthetic oligonucleotide
gggggaaatagtagcggc

SEQ ID NO: 34 - protein, 6 aa, Artificial Sequence
  Description of Artificial Sequence: Synthetic peptide
GGNSSG

SEQ ID NO: 35 - DNA, 54 bp, Artificial Sequence
  Description of Artificial Sequence: Synthetic oligonucleotide
ggcggcaacggcagcggcggcggcagcggctccggcggcaacggctctagcggc

SEQ ID NO: 36 - protein, 18 aa, Artificial Sequence
  Description of Artificial Sequence: Synthetic peptide
GGNGSGGGSGSGGNGSSG

SEQ ID NO: 37 - DNA, 57 bp, Artificial Sequence
  Description of Artificial Sequence: Synthetic oligonucleotide
ggaggaggaagcgggggaagcgggggaagcggaggaagcgggggaagcgggggaagc

SEQ ID NO: 38 - protein, 19 aa, Artificial Sequence
  Description of Artificial Sequence: Synthetic peptide
GGGSGGSGGSGGSGGSGGS

SEQ ID NO: 39 - DNA, 30 bp, Artificial Sequence
  Description of Artificial Sequence: Synthetic oligonucleotide
ggaggaggaagcgggggaagcggcggcggc

SEQ ID NO: 40 - protein, 10 aa, Artificial Sequence
  Description of Artificial Sequence: Synthetic peptide
GGGSGGSGGG

SEQ ID NO: 41 - DNA, 36 bp, Artificial Sequence
  Description of Artificial Sequence: Synthetic oligonucleotide
gggggaagcggaggaagcgggggaagcgggggaagc

SEQ ID NO: 42 - protein, 12 aa, Artificial Sequence
  Description of Artificial Sequence: Synthetic peptide
GGSGGSGGSGGS

SEQ ID NO: 43 - DNA, 9 bp, Artificial Sequence
  Description of Artificial Sequence: Synthetic oligonucleotide
ggaagcggc

SEQ ID NO: 44 - protein, 3 aa, Artificial Sequence
  Description of Artificial Sequence: Synthetic peptide
GSG

SEQ ID NO: 45 - DNA, 30 bp, Artificial Sequence
  Description of Artificial Sequence: Synthetic oligonucleotide
ggcggcagcggcagcggcgggagcggagga

SEQ ID NO: 46 - protein, 10 aa, Artificial Sequence
  Description of Artificial Sequence: Synthetic peptide
GGSGSGGSGG

SEQ ID NO: 47 - DNA, 333 bp, Artificial Sequence
  Description of Artificial Sequence: Synthetic polynucleotide
ggagggagcgatatgagaaaggacgccgagagacggtttgataagttcgtggaggctgctaagaataagtttgacaagtttaaggctgccctgcggaagggcgacatcaaggaggagaggagaaaggatatgaagaagctggcaaggaaggaggcagagcaggcaaggagggccgtgaggaacagactgagcgagctgctgtccaagatcaacgacatgcccatcaccaatgatcagaagaagctgatgtctaatgacgtgctgaagttcgccgcagaagccgaaaagaagattgaagccctggcagcagacgccgaaggaggaagcgggagc

SEQ ID NO: 48 - protein, 111 aa, Artificial Sequence
  Description of Artificial Sequence: Synthetic polypeptide
GGSDMRKDAERRFDKFVEAAKNKFDKFKAALRKGDIKEERRKDMKKLARKEAEQARRAVRNRLSELLSKINDMPITNDQKKLMSNDVLKFAAEAEKKIEALAADAEGGSGS

SEQ ID NO: 49 - DNA, 183 bp, Artificial Sequence
  Description of Artificial Sequence: Synthetic polynucleotide
gggggctctagcgggaaaagtctggtggataccgtctatgctctgaaagatgaggtgcaggaactgaggcaggacaacaaaaagatgaagaagagcctggaggaggagcagagggccagaaaggacctggaaaaactggtgcggaaagtgctgaaaaacatgaatgacggagggagtagcggg

SEQ ID NO: 50 - protein, 61 aa, Artificial Sequence
  Description of Artificial Sequence: Synthetic polypeptide
GGSSGKSLVDTVYALKDEVQELRQDNKKMKKSLEEEQRARKDLEKLVRKVLKNMNDGGSSG

SEQ ID NO: 51 - DNA, 390 bp, Artificial Sequence
  Description of Artificial Sequence: Synthetic polynucleotide
gggggctctagcggggcagacccaaagaaagtgctggataaggcaaaggatcaggcagagaatagagtgagagaactgaaacagaaactggaggaactgtataaggaggcccggaagctggacctgacccaggagatgaggagaaagctggagctgcgctacatcgccgccatgctgatggccatcggcgacatctataacgccatcaggcaggccaagcaggaggccgataagctgaagaaggccggcctggtgaatagccagcagctggacgagctgaagcggcgcctggaggagctgaaggaggaggcctccaggaaggccagagattatgggcgggaatttcagctgaaactggagtatggcggcggaagcggaagcgggagcggg

SEQ ID NO: 52 - protein, 130 aa, Artificial Sequence
  Description of Artificial Sequence: Synthetic polypeptide
GGSSGADPKKVLDKAKDQAENRVRELKQKLEELYKEARKLDLTQEMRRKLELRYIAAMLMAIGDIYNAIRQAKQEADKLKKAGLVNSQQLDELKRRLEELKEEASRKARDYGREFQLKLEYGGGSGSGSG

SEQ ID NO: 53 - DNA, 348 bp, Artificial Sequence
  Description of Artificial Sequence: Synthetic polynucleotide
ggaggctcttcaggcggcacagacgtgggggcaatcgctggaaaggctaacgaggctggacagggggcttatgatgctcaggtcaaaaacgacgagcaggatgtggagctggccgaccacgaggccaggatcaagcagctgagaatcgatgtggacgatcacgagtctcggatcaccgccaacacaaaggccatcacagccctgaatgtgcgcgtgaccacagcagagggagagatcgcatccctgcagaccaacgtgagcgccctggacggaagggtgaccacagcagagaacaatatctccgccctgcaggcagattacgtgagcggcggcagctccggctccgga

SEQ ID NO: 54 - protein, 116 aa, Artificial Sequence
  Description of Artificial Sequence: Synthetic polypeptide
GGSSGGTDVGAIAGKANEAGQGAYDAQVKNDEQDVELADHEARIKQLRIDVDDHESRITANTKAITALNVRVTTAEGEIASLQTNVSALDGRVTTAENNISALQADYVSGGSSGSG

SEQ ID NO: 55 - DNA, 450 bp, Artificial Sequence
  Description of Artificial Sequence: Synthetic polynucleotide
ggaggctctggaagcgggggaagtagcggacctcacatgattgctccaggacatcgggacgagtttgaccctaagctgccaacaggcgagaaagaagaggtgccaggcaagcccggcatcaagaaccctgagacaggcgacgtggtgaggccccctgtggattctgtgacaaagtacggcccagtgaagggcgacagcatcgtggagaaggaggagatccccttcgagaaggagaggaagtttaaccctgatctggccccaggcaccgagaaggtgacaagagagggccagaagggcgagaagaccatcaccacacccacactgaagaatcctctgaccggcgagatcatcagcaagggcgagtccaaggaggagatcacaaaggaccccatcaacgaactgaccgaatggggaccagagacaggaggaagcggcagcggcggaagcagc

SEQ ID NO: 56 - protein, 150 aa, Artificial Sequence
  Description of Artificial Sequence: Synthetic polypeptide
GGSGSGGSSGPHMIAPGHRDEFDPKLPTGEKEEVPGKPGIKNPETGDVVRPPVDSVTKYGPVKGDSIVEKEEIPFEKERKFNPDLAPGTEKVTREGQKGEKTITTPTLKNPLTGEIISKGESKEEITKDPINELTEWGPETGGSGSGGSS

SEQ ID NO: 57 - DNA, 24 bp, Artificial Sequence
  Description of Artificial Sequence: Synthetic oligonucleotide
ggaggcagcggcagcggcagcggg

SEQ ID NO: 58 - protein, 8 aa, Artificial Sequence
  Description of Artificial Sequence: Synthetic peptide
GGSGSGSG

SEQ ID NO: 59 - DNA, 3822 bp, Severe acute respiratory syndrome coronavirus 2
atgtttgtttttcttgttttattgccactagtctctagtcagtgtgttaatcttacaaccagaactcaattaccccctgcatacactaattctttcacacgtggtgtttattaccctgacaaagttttcagatcctcagttttacattcaactcaggacttgttcttacctttcttttccaatgttacttggttccatgctatacatgtctctgggaccaatggtactaagaggtttgataaccctgtcctaccatttaatgatggtgtttattttgcttccactgagaagtctaacataataagaggctggatttttggtactactttagattcgaagacccagtccctacttattgttaataacgctactaatgttgttattaaagtctgtgaatttcaattttgtaatgatccatttttgggtgtttattaccacaaaaacaacaaaagttggatggaaagtgagttcagagtttattctagtgcgaataattgcacttttgaatatgtctctcagccttttcttatggaccttgaaggaaaacagggtaatttcaaaaatcttagggaatttgtgtttaagaatattgatggttattttaaaatatattctaagcacacgcctattaatttagtgcgtgatctccctcagggtttttcggctttagaaccattggtagatttgccaataggtattaacatcactaggtttcaaactttacttgctttacatagaagttatttgactcctggtgattcttcttcaggttggacagctggtgctgcagcttattatgtgggttatcttcaacctaggacttttctattaaaatataatgaaaatggaaccattacagatgctgtagactgtgcacttgaccctctctcagaaacaaagtgtacgttgaaatccttcactgtagaaaaaggaatctatcaaacttctaactttagagtccaaccaacagaatctattgttagatttcctaatattacaaacttgtgcccttttggtgaagtttttaacgccaccagatttgcatctgtttatgcttggaacaggaagagaatcagcaactgtgttgctgattattctgtcctatataattccgcatcattttccacttttaagtgttatggagtgtctcctactaaattaaatgatctctgctttactaatgtctatgcagattcatttgtaattagaggtgatgaagtcagacaaatcgctccagggcaaactggaaagattgctgattataattataaattaccagatgattttacaggctgcgttatagcttggaattctaacaatcttgattctaaggttggtggtaattataattacctgtatagattgtttaggaagtctaatctcaaaccttttgagagagatatttcaactgaaatctatcaggccggtagcacaccttgtaatggtgttgaaggttttaattgttactttcctttacaatcatatggtttccaacccactaatggtgttggttaccaaccatacagagtagtagtactttcttttgaacttctacatgcaccagcaactgtttgtggacctaaaaagtctactaatttggttaaaaacaaatgtgtcaatttcaacttcaatggtttaacaggcacaggtgttcttactgagtctaacaaaaagtttctgcctttccaacaatttggcagagacattgctgacactactgatgctgtccgtgatccacagacacttgagattcttgacattacaccatgttcttttggtggtgtcagtgttataacaccaggaacaaatacttctaaccaggttgctgttctttatcaggatgttaactgcacagaagtccctgttgctattcatgcagatcaacttactcctacttggcgtgtttattctacaggttctaatgtttttcaaacacgtgcaggctgtttaataggggctgaacatgtcaacaactcatatgagtgtgacatacccattggtgcaggtatatgcgctagttatcagactcagactaattctcctcggcgggcacgtagtgtagctagtcaatccatcattgcctacactatgtcacttggtgcagaaaattcagttgcttactctaataactctattgccatacccacaaattttactattagtgttaccacagaaattctaccagtgtctatgaccaagacatcagtagattgtacaatgtacatttgtggtgattcaactgaatgcagcaatcttttgttgcaatatggcagtttttgtacacaattaaaccgtgctttaactggaatagctgttgaacaagacaaaaacacccaagaagtttttgcacaagtcaaacaaatttacaaaacaccaccaattaaagattttggtggttttaatttttcacaaatattaccagatccatcaaaaccaagcaagaggtcatttattgaagatctacttttcaacaaagtgacacttgcagatgctggcttcatcaaacaatatggtgattgccttggtgatattgctgctagagacctcatttgtgcacaaaagtttaacggccttactgttttgccacctttgctcacagatgaaatgattgctcaatacacttctgcactgttagcgggtacaatcacttctggttggacctttggtgcaggtgctgcattacaaataccatttgctatgcaaatggcttataggtttaatggtattggagttacacagaatgttctctatgagaaccaaaaattgattgccaaccaatttaatagtgctattggcaaaattcaagactcactttcttccacagcaagtgcacttggaaaacttcaagatgtggtcaaccaaaatgcacaagctttaaacacgcttgttaaacaacttagctccaattttggtgcaatttcaagtgttttaaatgatatcctttcacgtcttgacaaagttgaggctgaagtgcaaattgataggttgatcacaggcagacttcaaagtttgcagacatatgtgactcaacaattaattagagctgcagaaatcagagcttctgctaatcttgctgctactaaaatgtcagagtgtgtacttggacaatcaaaaagagttgatttttgtggaaagggctatcatcttatgtccttccctcagtcagcacctcatggtgtagtcttcttgcatgtgacttatgtccctgcacaagaaaagaacttcacaactgctcctgccatttgtcatgatggaaaagcacactttcctcgtgaaggtgtctttgtttcaaatggcacacactggtttgtaacacaaaggaatttttatgaaccacaaatcattactacagacaacacatttgtgtctggtaactgtgatgttgtaataggaattgtcaacaacacagtttatgatcctttgcaacctgaattagactcattcaaggaggagttagataaatattttaagaatcatacatcaccagatgttgatttaggtgacatctctggcattaatgcttcagttgtaaacattcaaaaagaaattgaccgcctcaatgaggttgccaagaatttaaatgaatctctcatcgatctccaagaacttggaaagtatgagcagtatataaaatggccatggtacatttggctaggttttatagctggcttgattgccatagtaatggtgacaattatgctttgctgtatgaccagttgctgtagttgtctcaagggctgttgttcttgtggatcctgctgcaaatttgatgaagacgactctgagccagtgctcaaaggagtcaaattacattacacataa

SEQ ID NO: 60 - protein, 1273 aa, Severe acute respiratory syndrome coronavirus 2
MFVFLVLLPLVSSQCVNLTTRTQLPPAYTNSFTRGVYYPDKVFRSSVLHSTQDLFLPFFSNVTWFHAIHVSGTNGTKRFDNPVLPFNDGVYFASTEKSNIIRGWIFGTTLDSKTQSLLIVNNATNVVIKVCEFQFCNDPFLGVYYHKNNKSWMESEFRVYSSANNCTFEYVSQPFLMDLEGKQGNFKNLREFVFKNIDGYFKIYSKHTPINLVRDLPQGFSALEPLVDLPIGINITRFQTLLALHRSYLTPGDSSSGWTAGAAAYYVGYLQPRTFLLKYNENGTITDAVDCALDPLSETKCTLKSFTVEKGIYQTSNFRVQPTESIVRFPNITNLCPFGEVFNATRFASVYAWNRKRISNCVADYSVLYNSASFSTFKCYGVSPTKLNDLCFTNVYADSFVIRGDEVRQIAPGQTGKIADYNYKLPDDFTGCVIAWNSNNLDSKVGGNYNYLYRLFRKSNLKPFERDISTEIYQAGSTPCNGVEGFNCYFPLQSYGFQPTNGVGYQPYRVVVLSFELLHAPATVCGPKKSTNLVKNKCVNFNFNGLTGTGVLTESNKKFLPFQQFGRDIADTTDAVRDPQTLEILDITPCSFGGVSVITPGTNTSNQVAVLYQDVNCTEVPVAIHADQLTPTWRVYSTGSNVFQTRAGCLIGAEHVNNSYECDIPIGAGICASYQTQTNSPRRARSVASQSIIAYTMSLGAENSVAYSNNSIAIPTNFTISVTTEILPVSMTKTSVDCTMYICGDSTECSNLLLQYGSFCTQLNRALTGIAVEQDKNTQEVFAQVKQIYKTPPIKDFGGFNFSQILPDPSKPSKRSFIEDLLFNKVTLADAGFIKQYGDCLGDIAARDLICAQKFNGLTVLPPLLTDEMIAQYTSALLAGTITSGWTFGAGAALQIPFAMQMAYRFNGIGVTQNVLYENQKLIANQFNSAIGKIQDSLSSTASALGKLQDVVNQNAQALNTLVKQLSSNFGAISSVLNDILSRLDKVEAEVQIDRLITGRLQSLQTYVTQQLIRAAEIRASANLAATKMSECVLGQSKRVDFCGKGYHLMSFPQSAPHGVVFLHVTYVPAQEKNFTTAPAICHDGKAHFPREGVFVSNGTHWFVTQRNFYEPQIITTDNTFVSGNCDVVIGIVNNTVYDPLQPELDSFKEELDKYFKNHTSPDVDLGDISGINASVVNIQKEIDRLNEVAKNLNESLIDLQELGKYEQYIKWPWYIWLGFIAGLIAIVMVTIMLCCMTSCCSCLKGCCSCGSCCKFDEDDSEPVLKGVKLHYT

SEQ ID NO: 61 - DNA, 228 bp, Severe acute respiratory syndrome coronavirus 2
atgtactcattcgtttcggaagagacaggtacgttaatagttaatagcgtacttctttttcttgctttcgtggtattcttgctagttacactagccatccttactgcgcttcgattgtgtgcgtactgctgcaatattgttaacgtgagtcttgtaaaaccttctttttacgtttactctcgtgttaaaaatctgaattcttctagagttcctgatcttctggtctaa

SEQ ID NO: 62 - protein, 75 aa, Severe acute respiratory syndrome coronavirus 2
MYSFVSEETGTLIVNSVLLFLAFVVFLLVTLAILTALRLCAYCCNIVNVSLVKPSFYVYSRVKNLNSSRVPDLLV

SEQ ID NO: 63 - DNA, 671 bp, Severe acute respiratory syndrome coronavirus 2
ccatggcagattccaacggtactattaccgttgaagagcttaaaaagctccttgaacaatggaacctagtaataggtttcctattccttacatggatttgtcttctacaatttgcctatgccaacaggaataggtttttgtatataattaagttaattttcctctggctgttatggccagtaactttagcttgttttgtgcttgctgctgtttacagaataaattggatcaccggtggaattgctatcgcaatggcttgtcttgtaggcttgatgtggctcagctacttcattgcttctttcagactgtttgcgcgtacgcgttccatgtggtcattcaatccagaaactaacattcttctcaacgtgccactccatggcactattctgaccagaccgcttctagaaagtgaactcgtaatcggagctgtgatccttcgtggacatcttcgtattgctggacaccatctaggacgctgtgacatcaaggacctgcctaaagaaatcactgttgctacatcacgaacgctttcttattacaaattgggagcttcgcagcgtgtagcaggtgactcaggttttgctgcatacagtcgctacaggattggcaactataaattaaacacagaccattccagtagcagtgacaatattgctttgcttgtacagtaa

SEQ ID NO: 64 - protein, 222 aa, Severe acute respiratory syndrome coronavirus 2
MADSNGTITVEELKKLLEQWNLVIGFLFLTWICLLQFAYANRNRFLYIIKLIFLWLLWPVTLACFVLAAVYRINWITGGIAIAMACLVGLMWLSYFIASFRLFARTRSMWSFNPETNILLNVPLHGTILTRPLLESELVIGAVILRGHLRIAGHHLGRCDIKDLPKEITVATSRTLSYYKLGASQRVAGDSGFAAYSRYRIGNYKLNTDHSSSSDNIALLVQ

SEQ ID NO: 65 - DNA, 1260 bp, Severe acute respiratory syndrome coronavirus 2
atgtctgataatggaccccaaaatcagcgaaatgcaccccgcattacgtttggtggaccctcagattcaactggcagtaaccagaatggagaacgcagtggggcgcgatcaaaacaacgtcggccccaaggtttacccaataatactgcgtcttggttcaccgctctcactcaacatggcaaggaagaccttaaattccctcgaggacaaggcgttccaattaacaccaatagcagtccagatgaccaaattggctactaccgaagagctaccagacgaattcgtggtggtgacggtaaaatgaaagatctcagtccaagatggtatttctactacctaggaactgggccagaagctggacttccctatggtgctaacaaagacggcatcatatgggttgcaactgagggagccttgaatacaccaaaagatcacattggcacccgcaatcctgctaacaatgctgcaatcgtgctacaacttcctcaaggaacaacattgccaaaaggcttctacgcagaagggagcagaggcggcagtcaagcctcttctcgttcctcatcacgtagtcgcaacagttcaagaaattcaactccaggcagcagtaggggaacttctcctgctagaatggctggcaatggcggtgatgctgctcttgctttgctgctgcttgacagattgaaccagcttgagagcaaaatgtctggtaaaggccaacaacaacaaggccaaactgtcactaagaaatctgctgctgaggcttctaagaagcctcggcaaaaacgtactgccactaaagcatacaatgtaacacaagctttcggcagacgtggtccagaacaaacccaaggaaattttggggaccaggaactaatcagacaaggaactgattacaaacattggccgcaaattgcacaatttgcccccagcgcttcagcgttcttcggaatgtcgcgcattggcatggaagtcacaccttcgggaacgtggttgacctacacaggtgccatcaaattggatgacaaagatccaaatttcaaagatcaagtcattttgctgaataagcatattgacgcatacaaaacattcccaccaacagagcctaaaaaggacaaaaagaagaaggctgatgaaactcaagccttaccgcagagacagaagaaacagcaaactgtgactcttcttcctgctgcagatttggatgatttctccaaacaattgcaacaatccatgagcagtgctgactcaactcaggcctaa

SEQ ID NO: 66 - protein, 419 aa, Severe acute respiratory syndrome coronavirus 2
MSDNGPQNQRNAPRITFGGPSDSTGSNQNGERSGARSKQRRPQGLPNNTASWFTALTQHGKEDLKFPRGQGVPINTNSSPDDQIGYYRRATRRIRGGDGKMKDLSPRWYFYYLGTGPEAGLPYGANKDGIIWVATEGALNTPKDHIGTRNPANNAAIVLQLPQGTTLPKGFYAEGSRGGSQASSRSSSRSRNSSRNSTPGSSRGTSPARMAGNGGDAALALLLLDRLNQLESKMSGKGQQQQGQTVTKKSAAEASKKPRQKRTATKAYNVTQAFGRRGPEQTQGNFGDQELIRQGTDYKHWPQIAQFAPSASAFFGMSRIGMEVTPSGTWLTYTGAIKLDDKDPNFKDQVILLNKHIDAYKTFPPTEPKKDKKKKADETQALPQRQKKQQTVTLLPAADLDDFSKQLQQSMSSADSTQA

SEQ ID NO: 67 - protein, 6 aa, Artificial Sequence
  Description of Artificial Sequence: Synthetic peptide
RRRRRR

SEQ ID NO: 68 - DNA, 1242 bp, Artificial Sequence
  Description of Artificial Sequence: Synthetic polynucleotide
ggatccgccaccatggactggacctggattctgttcctggtggccgccgccacaagggtgcacagcatgcagatctacgaaggaaaactgaccgctgagggactgaggttcggaattgtcgcaagccgcgcgaatcacgcactggtggataggctggtggaaggcgctatcgacgcaattgtccggcacggcgggagagaggaagacatcacactggtgagagtctgcggcagctgggagattcccgtggcagctggagaactggctcgaaaggaggacatcgatgccgtgatcgctattggggtcctgtgccgaggagcaactcccagcttcgactacatcgcctcagaagtgagcaaggggctggctgatctgtccctggagctgaggaaacctatcacttttggcgtgattactgccgacaccctggaacaggcaatcgaggcggccggcacctgccatggaaacaaaggctgggaagcagccctgtgcgctattgagatggcaaatctgttcaaatctctgcgaggaggctccggaggatctggagggagtggaggctcaggaggaggcgacaccatcacactgccatgccgccctgcaccacctccacattgtagctccaacatcaccggcctgattctgacaagacaggggggatatagtaacgataataccgtgattttcaggccctcaggaggggactggagggacatcgcacgatgccagattgctggaacagtggtctctactcagctgtttctgaacggcagtctggctgaggaagaggtggtcatccgatctgaagactggcgggataatgcaaagtcaatttgtgtgcagctgaacacaagcgtcgagatcaattgcactggcgcagggcactgtaacatttctcgggccaaatgggataataccctgaagcagatcgccagtaaactgagagagcagtacggcaataagacaatcatcttcaagccttctagtggaggcgacccagagttcgtgaaccatagctttaattgcgggggagagttcttttattgtgattccacacagctgttcgatagcacttggtttgattccaccggtgggagcggaagtggcggttccggatcattcattgaagaccttctctttaacaaggtgaccctcgccgatgcaggtttcattaagcaatatggtgattgcctgggagacatcgcggctcgtgatcttatttgtgcgcagaaattttaatga

SEQ ID NO: 69 - RNA, 1242 nt, Artificial Sequence
  Description of Artificial Sequence: Synthetic polynucleotide
ggauccgccaccauggacuggaccuggauucuguuccugguggccgccgccacaagggugcacagcaugcagaucuacgaaggaaaacugaccgcugagggacugagguucggaauugucgcaagccgcgcgaaucacgcacugguggauaggcugguggaaggcgcuaucgacgcaauuguccggcacggcgggagagaggaagacaucacacuggugagagucugcggcagcugggagauucccguggcagcuggagaacuggcucgaaaggaggacaucgaugccgugaucgcuauugggguccugugccgaggagcaacucccagcuucgacuacaucgccucagaagugagcaaggggcuggcugaucugucccuggagcugaggaaaccuaucacuuuuggcgugauuacugccgacacccuggaacaggcaaucgaggcggccggcaccugccauggaaacaaaggcugggaagcagcccugugcgcuauugagauggcaaaucuguucaaaucucugcgaggaggcuccggaggaucuggagggaguggaggcucaggaggaggcgacaccaucacacugccaugccgcccugcaccaccuccacauuguagcuccaacaucaccggccugauucugacaagacaggggggauauaguaacgauaauaccgugauuuucaggcccucaggaggggacuggagggacaucgcacgaugccagauugcuggaacaguggucucuacucagcuguuucugaacggcagucuggcugaggaagagguggucauccgaucugaagacuggcgggauaaugcaaagucaauuugugugcagcugaacacaagcgucgagaucaauugcacuggcgcagggcacuguaacauuucucgggccaaaugggauaauacccugaagcagaucgccaguaaacugagagagcaguacggcaauaagacaaucaucuucaagccuucuaguggaggcgacccagaguucgugaaccauagcuuuaauugcgggggagaguucuuuuauugugauuccacacagcuguucgauagcacuugguuugauuccaccggugggagcggaaguggcgguuccggaucauucauugaagaccuucucuuuaacaaggugacccucgccgaugcagguuucauuaagcaauauggugauugccugggagacaucgcggcucgugaucuuauuugugcgcagaaauuuuaauga

SEQ ID NO: 70 - protein, 408 aa, Artificial Sequence
  Description of Artificial Sequence: Synthetic polypeptide
MDWTWILFLVAAATRVHSMQIYEGKLTAEGLRFGIVASRANHALVDRLVEGAIDAIVRHGGREEDITLVRVCGSWEIPVAAGELARKEDIDAVIAIGVLCRGATPSFDYIASEVSKGLADLSLELRKPITFGVITADTLEQAIEAAGTCHGNKGWEAALCAIEMANLFKSLRGGSGGSGGSGGSGGGDTITLPCRPAPPPHCSSNITGLILTRQGGYSNDNTVIFRPSGGDWRDIARCQIAGTVVSTQLFLNGSLAEEEVVIRSEDWRDNAKSICVQLNTSVEINCTGAGHCNISRAKWDNTLKQIASKLREQYGNKTIIFKPSSGGDPEFVNHSFNCGGEFFYCDSTQLFDSTWFDSTGGSGSGGSGSFIEDLLFNKVTLADAGFIKQYGDCLGDIAARDLICAQKF

SEQ ID NO: 71 - DNA, 1167 bp, Artificial Sequence
  Description of Artificial Sequence: Synthetic polynucleotide
ggatccgccaccatggactggacctggattctgttcctggtggccgccgccacaagggtgcacagcatgcagatctacgaaggaaaactgaccgctgagggactgaggttcggaattgtcgcaagccgcgcgaatcacgcactggtggataggctggtggaaggcgctatcgacgcaattgtccggcacggcgggagagaggaagacatcacactggtgagagtctgcggcagctgggagattcccgtggcagctggagaactggctcgaaaggaggacatcgatgccgtgatcgctattggggtcctgtgccgaggagcaactcccagcttcgactacatcgcctcagaagtgagcaaggggctggctgatctgtccctggagctgaggaaacctatcacttttggcgtgattactgccgacaccctggaacaggcaatcgaggcggccggcacctgccatggaaacaaaggctgggaagcagccctgtgcgctattgagatggcaaatctgttcaaatctctgcgaggaggctccggaggatctggagggagtggaggctcaggaggaggcgacaccatcacactgccatgccgccctgcaccacctccacattgtagctccaacatcaccggcctgattctgacaagacaggggggatatagtaacgataataccgtgattttcaggccctcaggaggggactggagggacatcgcacgatgccagattgctggaacagtggtctctactcagctgtttctgaacggcagtctggctgaggaagaggtggtcatccgatctgaagactggcgggataatgcaaagtcaatttgtgtgcagctgaacacaagcgtcgagatcaattgcactggcgcagggcactgtaacatttctcgggccaaatgggataataccctgaagcagatcgccagtaaactgagagagcagtacggcaataagacaatcatcttcaagccttctagtggaggcgacccagagttcgtgaaccatagctttaattgcgggggagagttcttttattgtgattccacacagctgttcgatagcacttggtttgattccaccggtgggagcggaagtggcggttccggaccttcaaagagatctttcattgaagacctgcttttcaacaaggtctaatga

SEQ ID NO: 72 - RNA, 1167 nt, Artificial Sequence
  Description of Artificial Sequence: Synthetic polynucleotide
ggauccgccaccauggacuggaccuggauucuguuccugguggccgccgccacaagggugcacagcaugcagaucuacgaaggaaaacugaccgcugagggacugagguucggaauugucgcaagccgcgcgaaucacgcacugguggauaggcugguggaaggcgcuaucgacgcaauuguccggcacggcgggagagaggaagacaucacacuggugagagucugcggcagcugggagauucccguggcagcuggagaacuggcucgaaaggaggacaucgaugccgugaucgcuauugggguccugugccgaggagcaacucccagcuucgacuacaucgccucagaagugagcaaggggcuggcugaucugucccuggagcugaggaaaccuaucacuuuuggcgugauuacugccgacacccuggaacaggcaaucgaggcggccggcaccugccauggaaacaaaggcugggaagcagcccugugcgcuauugagauggcaaaucuguucaaaucucugcgaggaggcuccggaggaucuggagggaguggaggcucaggaggaggcgacaccaucacacugccaugccgcccugcaccaccuccacauuguagcuccaacaucaccggccugauucugacaagacaggggggauauaguaacgauaauaccgugauuuucaggcccucaggaggggacuggagggacaucgcacgaugccagauugcuggaacaguggucucuacucagcuguuucugaacggcagucuggcugaggaagagguggucauccgaucugaagacuggcgggauaaugcaaagucaauuugugugcagcugaacacaagcgucgagaucaauugcacuggcgcagggcacuguaacauuucucgggccaaaugggauaauacccugaagcagaucgccaguaaacugagagagcaguacggcaauaagacaaucaucuucaagccuucuaguggaggcgacccagaguucgugaaccauagcuuuaauugcgggggagaguucuuuuauugugauuccacacagcuguucgauagcacuugguuugauuccaccggugggagcggaaguggcgguuccggaccuucaaagagaucuuucauugaagaccugcuuuucaacaaggucuaauga

SEQ ID NO: 73 - protein, 383 aa, Artificial Sequence
  Description of Artificial Sequence: Synthetic polypeptide
MDWTWILFLVAAATRVHSMQIYEGKLTAEGLRFGIVASRANHALVDRLVEGAIDAIVRHGGREEDITLVRVCGSWEIPVAAGELARKEDIDAVIAIGVLCRGATPSFDYIASEVSKGLADLSLELRKPITFGVITADTLEQAIEAAGTCHGNKGWEAALCAIEMANLFKSLRGGSGGSGGSGGSGGGDTITLPCRPAPPPHCSSNITGLILTRQGGYSNDNTVIFRPSGGDWRDIARCQIAGTVVSTQLFLNGSLAEEEVVIRSEDWRDNAKSICVQLNTSVEINCTGAGHCNISRAKWDNTLKQIASKLREQYGNKTIIFKPSSGGDPEFVNHSFNCGGEFFYCDSTQLFDSTWFDSTGGSGSGGSGPSKRSFIEDLLFNKV

SEQ ID NO: 74 - DNA, 1758 bp, Artificial Sequence
  Description of Artificial Sequence: Synthetic polynucleotide
ggatccgccaccatggactggacctggattctgttcctggtggccgccgccacaagggtgcacagcctctcaattgccccaacgttgatcaaccgggacaagccatacacgaaagaggaacttatggagatattgcggttggccattatagctgaactcgatgcaattaatctctatgaacaaatggcccgctatagcgaagacgaaaatgtgagaaagatcttgttggacgtcgctagggaagagaaagcacacgtaggagagttcatggctttgttgcttaacctcgaccctgagcaagtcacagagctgaagggcgggttcgaggaagttaaagaattgaccggtatagaagctcacattaatgacaacaagaaagaggaaagtaatgtagagtatttcgagaagctcagatctgccttgttggatggagtcaacaagggtcgcagcttgctcaaacatctgcccgttacaagaatagaagggcagtcttttcgagtagacatcatcaaatttgaggacggcgtccgagtggttaaacaagagtataagcctataccccttcttaagaagaagttctacgtcggcattcgagaactgaatgacgggacatatgatgtcagcattgctactaaagccggtgagctgctggttaaagacgaagaaagtcttgtgatccgggaaattttgtcaacggaaggcatcaagaaaatgaaattgtcatcctgggacaatccagaagaagccctgaatgatttgatgaatgcgctccaagaagctagcaatgctagtgctggccccttcggccttattatcaatccaaagcggtacgccaaactgctgaagatctatgaaaagtcaggtaagatgctcgtagaagtactcaaggaaatcttccggggtggaataatcgtaactcttaatatcgacgaaaacaaagtgattatcttcgctaatacgcccgccgttctggacgtggtggtgggtcaagacgttacgctccaggagcttggtccggaaggggatgatgtcgcattcctggtcagtgaagccattggtataagaatcaagaacccggaagctatagttgttctcgaaggcgggtctggtgggagcggtggtagtggtggttctggtggtggtgggtcaggtggcggctcaggcggcggcaatctgtgccctttcggtgaggtctttaatgcaacaagatttgcaagtgtttacgcctggaaccgtaagcgcattagcaactgcactgccgattactctgtgctgtacaacagcacaagcttttccacatttaaatgttacggggtttcccctaccaacctcagcgacctctgctttactaatgtttacgcagattccttcgttatccgaggcgatgaagtccggcagatagctcccggacagaccggcaaaatcgctgactacaactataaactgccgaacgacagcacagggtgtgtaattgcttggaacagcaataacctcgattcaaaggttggcggaaattacaattatctttaccgtctgttccggaaaagcaatctgaaaccctttgagagagacatcagcacggaaatttatcaagccggttcaacaccatgtaacggagttgaaggctttaattgctattttcccctgcaatcttacggatttcaacctacgaacggggtcggttaccaaccttaccgggtggtcgtgctgagcttcgaattgcttcatgccccagccaccgtgtgtgggccataatga

SEQ ID NO: 75 - RNA, 1758 nt, Artificial Sequence
  Description of Artificial Sequence: Synthetic polynucleotide
ggauccgccaccauggacuggaccuggauucuguuccugguggccgccgccacaagggugcacagccucucaauugccccaacguugaucaaccgggacaagccauacacgaaagaggaacuuauggagauauugcgguuggccauuauagcugaacucgaugcaauuaaucucuaugaacaaauggcccgcuauagcgaagacgaaaaugugagaaagaucuuguuggacgucgcuagggaagagaaagcacacguaggagaguucauggcuuuguugcuuaaccucgacccugagcaagucacagagcugaagggcggguucgaggaaguuaaagaauugaccgguauagaagcucacauuaaugacaacaagaaagaggaaaguaauguagaguauuucgagaagcucagaucugccuuguuggauggagucaacaagggucgcagcuugcucaaacaucugcccguuacaagaauagaagggcagucuuuucgaguagacaucaucaaauuugaggacggcguccgagugguuaaacaagaguauaagccuauaccccuucuuaagaagaaguucuacgucggcauucgagaacugaaugacgggacauaugaugucagcauugcuacuaaagccggugagcugcugguuaaagacgaagaaagucuugugauccgggaaauuuugucaacggaaggcaucaagaaaaugaaauugucauccugggacaauccagaagaagcccugaaugauuugaugaaugcgcuccaagaagcuagcaaugcuagugcuggccccuucggccuuauuaucaauccaaagcgguacgccaaacugcugaagaucuaugaaaagucagguaagaugcucguagaaguacucaaggaaaucuuccgggguggaauaaucguaacucuuaauaucgacgaaaacaaagugauuaucuucgcuaauacgcccgccguucuggacgugguggugggucaagacguuacgcuccaggagcuugguccggaaggggaugaugucgcauuccuggucagugaagccauugguauaagaaucaagaacccggaagcuauaguuguucucgaaggcgggucuggugggagcggugguaguggugguucuggugguggugggucagguggcggcucaggcggcggcaaucugugcccuuucggugaggucuuuaaugcaacaagauuugcaaguguuuacgccuggaaccguaagcgcauuagcaacugcacugccgauuacucugugcuguacaacagcacaagcuuuuccacauuuaaauguuacgggguuuccccuaccaaccucagcgaccucugcuuuacuaauguuuacgcagauuccuucguuauccgaggcgaugaaguccggcagauagcucccggacagaccggcaaaaucgcugacuacaacuauaaacugccgaacgacagcacaggguguguaauugcuuggaacagcaauaaccucgauucaaagguuggcggaaauuacaauuaucuuuaccgucuguuccggaaaagcaaucugaaacccuuugagagagacaucagcacggaaauuuaucaagccgguucaacaccauguaacggaguugaaggcuuuaauugcuauuuuccccugcaaucuuacggauuucaaccuacgaacggggucgguuaccaaccuuaccggguggucgugcugagcuucgaauugcuucaugccccagccaccgugugugggccauaauga

SEQ ID NO: 76 - protein, 580 aa, Artificial Sequence
  Description of Artificial Sequence: Synthetic polypeptide
MDWTWILFLVAAATRVHSLSIAPTLINRDKPYTKEELMEILRLAIIAELDAINLYEQMARYSEDENVRKILLDVAREEKAHVGEFMALLLNLDPEQVTELKGGFEEVKELTGIEAHINDNKKEESNVEYFEKLRSALLDGVNKGRSLLKHLPVTRIEGQSFRVDIIKFEDGVRVVKQEYKPIPLLKKKFYVGIRELNDGTYDVSIATKAGELLVKDEESLVIREILSTEGIKKMKLSSWDNPEEALNDLMNALQEASNASAGPFGLIINPKRYAKLLKIYEKSGKMLVEVLKEIFRGGIIVTLNIDENKVIIFANTPAVLDVVVGQDVTLQELGPEGDDVAFLVSEAIGIRIKNPEAIVVLEGGSGGSGGSGGSGGGGSGGGSGGGNLCPFGEVFNATRFASVYAWNRKRISNCTADYSVLYNSTSFSTFKCYGVSPTNLSDLCFTNVYADSFVIRGDEVRQIAPGQTGKIADYNYKLPNDSTGCVIAWNSNNLDSKVGGNYNYLYRLFRKSNLKPFERDISTEIYQAGSTPCNGVEGFNCYFPLQSYGFQPTNGVGYQPYRVVVLSFELLHAPATVCGP

SEQ ID NO: 77 - DNA, 1161 bp, Artificial Sequence
  Description of Artificial Sequence: Synthetic polynucleotide
ggatccgccaccatggactggacctggattctgttcctggtggccgccgccacaagggtgcacagcatgcagatctacgaaggaaaactgaccgctgagggactgaggttcggaattgtcgcaagccgcgcgaatcacgcactggtggataggctggtggaaggcgctatcgacgcaattgtccggcacggcgggagagaggaagacatcacactggtgagagtctgcggcagctgggagattcccgtggcagctggagaactggctcgaaaggaggacatcgatgccgtgatcgctattggggtcctgtgccgaggagcaactcccagcttcgactacatcgcctcagaagtgagcaaggggctggctgatctgtccctggagctgaggaaacctatcacttttggcgtgattactgccgacaccctggaacaggcaatcgaggcggccggcacctgccatggaaacaaaggctgggaagcagccctgtgcgctattgagatggcaaatctgttcaaatctctgcgaggaggctccggaggatctggagggagtggaggctcaggaggaggcaatctgtgccctttcggtgaggtctttaatgcaacaagatttgcaagtgtttacgcctggaaccgtaagcgcattagcaactgcactgccgattactctgtgctgtacaacagcacaagcttttccacatttaaatgttacggggtttcccctaccaacctcagcgacctctgctttactaatgtttacgcagattccttcgttatccgaggcgatgaagtccggcagatagctcccggacagaccggcaaaatcgctgactacaactataaactgccgaacgacagcacagggtgtgtaattgcttggaacagcaataacctcgattcaaaggttggcggaaattacaattatctttaccgtctgttccggaaaagcaatctgaaaccctttgagagagacatcagcacggaaatttatcaagccggttcaacaccatgtaacggagttgaaggctttaattgctattttcccctgcaatcttacggatttcaacctacgaacggggtcggttaccaaccttaccgggtggtcgtgctgagcttcgaattgcttcatgccccagccaccgtgtgtgggccataatga

SEQ ID NO: 78 - RNA, 1161 nt, Artificial Sequence
  Description of Artificial Sequence: Synthetic polynucleotide
ggauccgccaccauggacuggaccuggauucuguuccugguggccgccgccacaagggugcacagcaugcagaucuacgaaggaaaacugaccgcugagggacugagguucggaauugucgcaagccgcgcgaaucacgcacugguggauaggcugguggaaggcgcuaucgacgcaauuguccggcacggcgggagagaggaagacaucacacuggugagagucugcggcagcugggagauucccguggcagcuggagaacuggcucgaaaggaggacaucgaugccgugaucgcuauugggguccugugccgaggagcaacucccagcuucgacuacaucgccucagaagugagcaaggggcuggcugaucugucccuggagcugaggaaaccuaucacuuuuggcgugauuacugccgacacccuggaacaggcaaucgaggcggccggcaccugccauggaaacaaaggcugggaagcagcccugugcgcuauugagauggcaaaucuguucaaaucucugcgaggaggcuccggaggaucuggagggaguggaggcucaggaggaggcaaucugugcccuuucggugaggucuuuaaugcaacaagauuugcaaguguuuacgccuggaaccguaagcgcauuagcaacugcacugccgauuacucugugcuguacaacagcacaagcuuuuccacauuuaaauguuacgggguuuccccuaccaaccucagcgaccucugcuuuacuaauguuuacgcagauuccuucguuauccgaggcgaugaaguccggcagauagcucccggacagaccggcaaaaucgcugacuacaacuauaaacugccgaacgacagcacaggguguguaauugcuuggaacagcaauaaccucgauucaaagguuggcggaaauuacaauuaucuuuaccgucuguuccggaaaagcaaucugaaacccuuugagagagacaucagcacggaaauuuaucaagccgguucaacaccauguaacggaguugaaggcuuuaauugcuauuuuccccugcaaucuuacggauuucaaccuacgaacggggucgguuaccaaccuuaccggguggucgugcugagcuucgaauugcuucaugccccagccaccgugugugggccauaauga

SEQ ID NO: 79 - protein, 381 aa, Artificial Sequence
  Description of Artificial Sequence: Synthetic polypeptide
MDWTWILFLVAAATRVHSMQIYEGKLTAEGLRFGIVASRANHALVDRLVEGAIDAIVRHGGREEDITLVRVCGSWEIPVAAGELARKEDIDAVIAIGVLCRGATPSFDYIASEVSKGLADLSLELRKPITFGVITADTLEQAIEAAGTCHGNKGWEAALCAIEMANLFKSLRGGSGGSGGSGGSGGGNLCPFGEVFNATRFASVYAWNRKRISNCTADYSVLYNSTSFSTFKCYGVSPTNLSDLCFTNVYADSFVIRGDEVRQIAPGQTGKIADYNYKLPNDSTGCVIAWNSNNLDSKVGGNYNYLYRLFRKSNLKPFERDISTEIYQAGSTPCNGVEGFNCYFPLQSYGFQPTNGVGYQPYRVVVLSFELLHAPATVCGP

SEQ ID NO: 80 - DNA, 864 bp, Artificial Sequence
  Description of Artificial Sequence: Synthetic polynucleotide
ggatccgccaccatggactggacctggattctgttcctggtggccgccgccacaagggtgcacagcaatctctgtccattcggagaggttttcaacgcgacgagattcgcctcagtttatgcctggaaccgtaaacggatatcaaactgcgtggctgactactctgttttatacaactccgcctctttcagtaccttcaagtgttacggtgtcagccctaccaaattgaatgatctctgctttacaaatgtttacgcagattcttttgtcataaggggcgatgaggttcggcaaatcgcccccgggcagacaggcaaaattgcggactataattataagttgccagacgatttcacgggctgcgtcatcgcctggaacagtaataatctcgattcaaaagtgggtgggaactacaattatctctacaggttattccggaagtcaaatctgaagcccttcgaacgcgacatcagtacggagatttaccaggctggaagcactccgtgcaacggggtggaggggttcaactgttattttcctctgcagtcttatgggtttcagcccactaatggtgtgggataccagccgtacagagtcgtggtgctgtccttcgaacttctccacgctcccgccaccgtctgtggtcccgggggatctggcggatcagggggtagtggaggtagcggcggcgggaagaaacagggagacgctgacgtctgtggggaagtggcttacatccagagcgtggtgtctgattgccatgtaccaaccgcggagctcaggactcttttagagattcggaaactgtttctggagatccaaaagctgaaggtcgaactccagggcctgtcaaaagaatgataa

SEQ ID NO: 81 - RNA, 864 nt, Artificial Sequence
  Description of Artificial Sequence: Synthetic polynucleotide
ggauccgccaccauggacuggaccuggauucuguuccugguggccgccgccacaagggugcacagcaaucucuguccauucggagagguuuucaacgcgacgagauucgccucaguuuaugccuggaaccguaaacggauaucaaacugcguggcugacuacucuguuuuauacaacuccgccucuuucaguaccuucaaguguuacggugucagcccuaccaaauugaaugaucucugcuuuacaaauguuuacgcagauucuuuugucauaaggggcgaugagguucggcaaaucgcccccgggcagacaggcaaaauugcggacuauaauuauaaguugccagacgauuucacgggcugcgucaucgccuggaacaguaauaaucucgauucaaaagugggugggaacuacaauuaucucuacagguuauuccggaagucaaaucugaagcccuucgaacgcgacaucaguacggagauuuaccaggcuggaagcacuccgugcaacgggguggagggguucaacuguuauuuuccucugcagucuuauggguuucagcccacuaauggugugggauaccagccguacagagucguggugcuguccuucgaacuucuccacgcucccgccaccgucuguggucccgggggaucuggcggaucaggggguaguggagguagcggcggcgggaagaaacagggagacgcugacgucuguggggaaguggcuuacauccagagcguggugucugauugccauguaccaaccgcggagcucaggacucuuuuagagauucggaaacuguuucuggagauccaaaagcugaaggucgaacuccagggccugucaaaagaaugauaa

SEQ ID NO: 82 - protein, 264 aa, Artificial Sequence
  Description of Artificial Sequence: Synthetic polypeptide
NLCPFGEVFNATRFASVYAWNRKRISNCVADYSVLYNSASFSTFKCYGVSPTKLNDLCFTNVYADSFVIRGDEVRQIAPGQTGKIADYNYKLPDDFTGCVIAWNSNNLDSKVGGNYNYLYRLFRKSNLKPFERDISTEIYQAGSTPCNGVEGFNCYFPLQSYGFQPTNGVGYQPYRVVVLSFELLHAPATVCGPGGSGGSGGSGGSGGGKKQGDADVCGEVAYIQSVVSDCHVPTAELRTLLEIRKLFLEIQKLKVELQGLSKE

SEQ ID NO: 83 - DNA, 954 bp, Artificial Sequence
  Description of Artificial Sequence: Synthetic polynucleotide
ggatccgccaccatggactggacctggattctgttcctggtggccgccgccacaagggtgcacagcaatctgtgtcccttcggggaggttttcaatgctaccagatttgccagtgtgtatgcttggaatcggaagagaatctccaattgcacagcagattattcagttctctacaactctacatcttttagtacctttaagtgttacggggtgagtcccactaacctttcagatttatgtttcaccaatgtctacgctgactccttcgtgatccggggggatgaggtgagacagattgcacctggacaaactggcaaaatcgccgactacaattacaaacttccaaacgactctacagggtgtgtaatcgcttggaacagcaataatctggatagcaaagtaggcggcaattataattacctctacagactgtttaggaagtccaacctgaaaccatttgagagggacatcagcactgaaatctaccaggcggggagcaccccttgtaatggagtcgagggtttcaactgttacttcccactgcagagctacgggttccagcctaccaatggtgtcggttaccagccctatcgagttgtggtgttgtcattcgaactgttacatgcacctgcaacggtctgtggacccgggggttcagggggtagtggggggtccggtgggagcggtgggggcaagaaacaggggatgaatccgctcatcgccgccgcctctgtgatagctgctggcctggccgtgggcctggcatcaatcgggcccggggtgggccaaggcaccgccgccggccaggccgtcgagggtattgcaaggcagccggaggcagaaggcaaaattagagggaccctgttgttgtctttagcgttcatggaagccctcactatttacggactggttgtggccttagcccttctgtttgccaatcctttcgtgtaatga

SEQ ID NO: 84 - RNA, 954 nt, Artificial Sequence
  Description of Artificial Sequence: Synthetic polynucleotide
ggauccgccaccauggacuggaccuggauucuguuccugguggccgccgccacaagggugcacagcaaucugugucccuucggggagguuuucaaugcuaccagauuugccaguguguaugcuuggaaucggaagagaaucuccaauugcacagcagauuauucaguucucuacaacucuacaucuuuuaguaccuuuaaguguuacggggugagucccacuaaccuuucagauuuauguuucaccaaugucuacgcugacuccuucgugauccggggggaugaggugagacagauugcaccuggacaaacuggcaaaaucgccgacuacaauuacaaacuuccaaacgacucuacaggguguguaaucgcuuggaacagcaauaaucuggauagcaaaguaggcggcaauuauaauuaccucuacagacuguuuaggaaguccaaccugaaaccauuugagagggacaucagcacugaaaucuaccaggcggggagcaccccuuguaauggagucgaggguuucaacuguuacuucccacugcagagcuacggguuccagccuaccaauggugucgguuaccagcccuaucgaguugugguguugucauucgaacuguuacaugcaccugcaacggucuguggacccggggguucaggggguagugggggguccggugggagcggugggggcaagaaacaggggaugaauccgcucaucgccgccgccucugugauagcugcuggccuggccgugggccuggcaucaaucgggcccggggugggccaaggcaccgccgccggccaggccgucgaggguauugcaaggcagccggaggcagaaggcaaaauuagagggacccuguuguugucuuuagcguucauggaagcccucacuauuuacggacugguuguggccuuagcccuucuguuugccaauccuuucguguaauga

SEQ ID NO: 85 - protein, 294 aa, Artificial Sequence
  Description of Artificial Sequence: Synthetic polypeptide
NLCPFGEVFNATRFASVYAWNRKRISNCTADYSVLYNSTSFSTFKCYGVSPTNLSDLCFTNVYADSFVIRGDEVRQIAPGQTGKIADYNYKLPNDSTGCVIAWNSNNLDSKVGGNYNYLYRLFRKSNLKPFERDISTEIYQAGSTPCNGVEGFNCYFPLQSYGFQPTNGVGYQPYRVVVLSFELLHAPATVCGPGGSGGSGGSGGSGGGKKQGMNPLIAAASVIAAGLAVGLASIGPGVGQGTAAGQAVEGIARQPEAEGKIRGTLLLSLAFMEALTIYGLVVALALLFANPFV

SEQ ID NO: 86 - DNA, 1200 bp, Artificial Sequence
  Description of Artificial Sequence: Synthetic polynucleotide
ggatccgccaccatggactggacctggattctgttcctggtggccgccgccacaagggtgcacagcaacctgtgccccttcggggaagtttttaatgccactcggtttgcctccgtttacgcctggaacaggaagcgcatttccaactgcaccgccgactatagcgtcctttataacagcacatccttttcaactttcaagtgttacggggtttcccctacaaatctctctgacctgtgttttacaaatgtgtatgcagactctttcgtgattaggggagatgaggtgcgccagatcgcccctggacagaccggaaaaatcgccgattataattataagcttcccaacgactccacaggctgtgtaattgcctggaattctaataacctggactctaaagtgggcggtaactacaattatctgtatagactcttcagaaagtctaacctcaaaccatttgaacgggacatctcaaccgagatctaccaagccgggtccaccccctgtaacggcgtggaaggcttcaactgttatttccccctccagtcctatggcttccaacccacaaatggagtcggctaccagccttacagggtggttgtgctgtcatttgagctcctccacgctcctgccactgtatgtgggccaggcgggtccggaggttcaggcggtagcggcggctcaggtggaggaggactgtctaaagatattataaaactgctgaacgaacaagtgaacaaggagatgcagagcagcaacctttacatgtctatgagcagttggtgttacactcactctctcgacggcgccggcctgttcctgtttgatcacgccgcggaggagtatgaacatgctaaaaagcttatcatcttcctcaacgaaaataacgtgccagtgcagttgacctctatttccgctcccgaacataagttcgaaggcctcacacagatctttcagaaggcttacgagcatgaacaacacatttcagagagcatcaacaacatcgtggaccatgcgatcaagtctaaggaccacgcgacttttaacttcctccagtggtatgtcgccgaacagcatgaggaggaagtgttgttcaaagacatcctggacaagattgaacttattggcaacgaaaaccacggcctctacctggccgatcagtacgtgaaaggtatcgcgaagtcacgaaagagttaatga

SEQ ID NO: 87 - RNA, 1200 nt, Artificial Sequence
  Description of Artificial Sequence: Synthetic polynucleotide
ggauccgccaccauggacuggaccuggauucuguuccugguggccgccgccacaagggugcacagcaaccugugccccuucggggaaguuuuuaaugccacucgguuugccuccguuuacgccuggaacaggaagcgcauuuccaacugcaccgccgacuauagcguccuuuauaacagcacauccuuuucaacuuucaaguguuacgggguuuccccuacaaaucucucugaccuguguuuuacaaauguguaugcagacucuuucgugauuaggggagaugaggugcgccagaucgccccuggacagaccggaaaaaucgccgauuauaauuauaagcuucccaacgacuccacaggcuguguaauugccuggaauucuaauaaccuggacucuaaagugggcgguaacuacaauuaucuguauagacucuucagaaagucuaaccucaaaccauuugaacgggacaucucaaccgagaucuaccaagccggguccacccccuguaacggcguggaaggcuucaacuguuauuucccccuccaguccuauggcuuccaacccacaaauggagucggcuaccagccuuacagggugguugugcugucauuugagcuccuccacgcuccugccacuguaugugggccaggcggguccggagguucaggcgguagcggcggcucagguggaggaggacugucuaaagauauuauaaaacugcugaacgaacaagugaacaaggagaugcagagcagcaaccuuuacaugucuaugagcaguugguguuacacucacucucucgacggcgccggccuguuccuguuugaucacgccgcggaggaguaugaacaugcuaaaaagcuuaucaucuuccucaacgaaaauaacgugccagugcaguugaccucuauuuccgcucccgaacauaaguucgaaggccucacacagaucuuucagaaggcuuacgagcaugaacaacacauuucagagagcaucaacaacaucguggaccaugcgaucaagucuaaggaccacgcgacuuuuaacuuccuccagugguaugucgccgaacagcaugaggaggaaguguuguucaaagacauccuggacaagauugaacuuauuggcaacgaaaaccacggccucuaccuggccgaucaguacgugaaagguaucgcgaagucacgaaagaguuaauga

SEQ ID NO: 88 - protein, 376 aa, Artificial Sequence
  Description of Artificial Sequence: Synthetic polypeptide
NLCPFGEVFNATRFASVYAWNRKRISNCTADYSVLYNSTSFSTFKCYGVSPTNLSDLCFTNVYADSFVIRGDEVRQIAPGQTGKIADYNYKLPNDSTGCVIAWNSNNLDSKVGGNYNYLYRLFRKSNLKPFERDISTEIYQAGSTPCNGVEGFNCYFPLQSYGFQPTNGVGYQPYRVVVLSFELLHAPATVCGPGGSGGSGGSGGSGGGGLSKDIIKLLNEQVNKEMQSSNLYMSMSSWCYTHSLDGAGLFLFDHAAEEYEHAKKLIIFLNENNVPVQLTSISAPEHKFEGLTQIFQKAYEHEQHISESINNIVDHAIKSKDHATFNFLQWYVAEQHEEEVLFKDILDKIELIGNENHGLYLADQYVKGIAKSRKS

SEQ ID NO: 89 - DNA, 864 bp, Artificial Sequence
  Description of Artificial Sequence: Synthetic polynucleotide
ggatccgccaccatggactggacctggattctgttcctggtggccgccgccacaagggtgcacagcaatctttgtccattcggggaagtgtttaacgccactaggttcgctagtgtgtacgcctggaatcggaagcggatttcaaattgtaccgccgattattctgtcctttacaacagtaccagcttttccacttttaaatgctacggagtatctcctacaaacttgagtgacctgtgttttacgaacgtctacgctgactctttcgttattaggggagacgaagttagacaaatcgctccaggccagactggcaaaatagccgactataactataaactcccaaacgattccacaggctgcgttattgcctggaacagcaataacctggactctaaagtcggaggtaactataactacttgtacaggctcttccgcaagagcaaccttaagccatttgagcgagatatctccaccgagatttatcaggcagggagcaccccatgcaacggagtggaggggtttaattgctattttccactgcagtcctatggctttcaaccaacaaacggagtaggctaccaaccgtatcgcgttgtcgtcctgagtttcgaactgttgcacgcccctgcgaccgtatgtggccccggcggctcaggggggagtggtgggagcgggggctctgggggggggaaaaaacagggggacgccgatgtttgcggcgaggtggcctatatacagtcagtggtctccgactgtcatgtaccaactgccgaactcaggactcttctggagataaggaagttgttcctggagatacagaagctcaaggtcgagttacagggtctctcaaaggaatgatga

SEQ ID NO: 90 - RNA, 864 nt, Artificial Sequence
  Description of Artificial Sequence: Synthetic polynucleotide
ggauccgccaccauggacuggaccuggauucuguuccugguggccgccgccacaagggugcacagcaaucuuuguccauucggggaaguguuuaacgccacuagguucgcuaguguguacgccuggaaucggaagcggauuucaaauuguaccgccgauuauucuguccuuuacaacaguaccagcuuuuccacuuuuaaaugcuacggaguaucuccuacaaacuugagugaccuguguuuuacgaacgucuacgcugacucuuucguuauuaggggagacgaaguuagacaaaucgcuccaggccagacuggcaaaauagccgacuauaacuauaaacucccaaacgauuccacaggcugcguuauugccuggaacagcaauaaccuggacucuaaagucggagguaacuauaacuacuuguacaggcucuuccgcaagagcaaccuuaagccauuugagcgagauaucuccaccgagauuuaucaggcagggagcaccccaugcaacggaguggagggguuuaauugcuauuuuccacugcaguccuauggcuuucaaccaacaaacggaguaggcuaccaaccguaucgcguugucguccugaguuucgaacuguugcacgccccugcgaccguauguggccccggcggcucaggggggaguggugggagcgggggcucugggggggggaaaaaacagggggacgccgauguuugcggcgagguggccuauauacagucaguggucuccgacugucauguaccaacugccgaacucaggacucuucuggagauaaggaaguuguuccuggagauacagaagcucaaggucgaguuacagggucucucaaaggaaugauga

SEQ ID NO: 91 - protein, 264 aa, Artificial Sequence
  Description of Artificial Sequence: Synthetic polypeptide
NLCPFGEVFNATRFASVYAWNRKRISNCTADYSVLYNSTSFSTFKCYGVSPTNLSDLCFTNVYADSFVIRGDEVRQIAPGQTGKIADYNYKLPNDSTGCVIAWNSNNLDSKVGGNYNYLYRLFRKSNLKPFERDISTEIYQAGSTPCNGVEGFNCYFPLQSYGFQPTNGVGYQPYRVVVLSFELLHAPATVCGPGGSGGSGGSGGSGGGKKQGDADVCGEVAYIQSVVSDCHVPTAELRTLLEIRKLFLEIQKLKVELQGLSKE

SEQ ID NO: 92 - DNA, 3840 bp, Artificial Sequence
  Description of Artificial Sequence: Synthetic polynucleotide
ggatccgccaccatggactggacctggattctgttcctggtggccgccgccacaagggtgcacagcatgtttgttttcctcgtcctcttgcccctcgtctctagtcaatgtgttaatttgaccacacgaacccaactgccacctgcctacaccaacagttttaccagaggagtttattaccccgacaaagtattcaggtcatcagtgctgcatagtacccaagacttgtttctccccttctttagtaacgttacatggttccacgccattcacgtgagtgggacaaatggaacaaaacgcttcgacaaccctgtgctccccttcaacgatggtgtatactttgctagtaccgagaagagcggaattatccgcgggtggatctttggaacaacactggacagcaaaacccaaagcctgcttatcgttaacaatgctactaacgttgtgatcaaagtgtgtgaattccaattttgtaatgatccgtttctcggagtttactaccacaagaacaacaaaagttggatggaaagcgaattccgggtgtactcctcagcaaataattgtacctttgagtacgtgagtcaaccctttctcatggacctggaaggaaaacaaggcaatttcaagaacctgcgggagtttgtgttcaagaatattgatggctattttaaaatttattctaagcatactccaatcaacctggtaagggacctgccccaaggcttttcagccctcgaaccgcttgtagatttgcctatcgggataaacattacgcgatttcaaacgctgttggcgctccaccggagctacttgactcctggcgatagcagctccggttggaccgctggagcggccgcttattacgtcggctatctgcaacccaggacgttcctgctcaagtataatgagaacgggacgattacagatgcagtggattgtgcgcttgatcctctctctgaaaccaagtgcactctcaagtctttcacggtggagaaaggcatttatcaaactagtaactttcgagtacagcctactgagagtatcgttaggttcccaaacattacgaacctctgtccctttggagaagtattcaatgctactcgctttgcaagcgtttatgcctggaatcgcaaacgcatcagcaattgcgtcgccgattattctgtcctttataatagcgcatcattttcaacatttaagtgttatggggtgagtccgactaagctcaatgatttgtgcttcacaaacgtctacgcggacagctttgtgataaggggcgacgaagttcgccaaatcgctcccggccaaactgggaaaatcgcggattacaactataaattgcccgatgacttcaccggctgtgtcattgcctggaactctaataacctcgatagcaaggtgggcgggaactataattatttgtaccgcctgtttcgaaagtccaatctcaaaccctttgagcgggacatttccactgagatctatcaggcagggagtacaccttgtaacggcgtggaaggctttaactgttattttcccctgcaaagttacggttttcaacctaccaacggagttggctatcaaccttatcgagtcgtcgtgctgagttttgagttgctgcatgccccagccaccgtctgtggacctaagaaatccaccaacctcgtgaagaacaagtgcgtcaattttaattttaacggcctgactgggaccggtgtcctcaccgaatctaataagaagttcctgccatttcaacaattcggacgggacatcgctggaacgacagatgctgtccgtgatcctcagacactggagattctggacatcactccttgcagctttggcggagtctctgttattactcccggaactaacacttctaaccaagttgctgtcctctatcaggacgtgaactgcactgaagtgcccgtggcaatccatgcaggccaactgacccccacttggagagtctacagcacggggagcaatgtcttccaaacaagggccggatgccttattggagcggagcacgttaataactcatacgagtgtgatataccaattggagcaggaatttgtgcttcctaccagacccaaactaacagtcccaggcgggctaggagtgtcgctagccagagcatcatcgcgtacacaatgtctctcggcgcagaaaactcagtcgcctatagcaacaactcaattgccattcccaccaacttcacaatttccgtaaccactgaaattctgcctgttagcatgacaaagacatcagttgattgtacaatgtacatatgtggagacagcaccgaatgcagcaaccttttgcttcaatatggctccttttgtacccaactcaacagggcactcactgggatagcagtcgaacaagataagaacacccaagaggtgtttgcacaagtcaaacaaatctataaaacgccgcccataaaagactttggcggattcaatttcagccagatcttgcctgacccatccaagccttcaaagaggagctttattgaggatcttctcttcaataaagtgacactggcggacgccggttttatcaagcaatatggtgattgtctcggtgacatagcagctagagatctgatttgcgctcagaaatttaatggccttactgtgcttcccccactgctgaccgatgaaatgattgcacaatatacaagcgcccttttggccgggactattacttccgggtggaccttcggcgccggcgccgctctgcaaattcctttcgcaatgcagatggcctaccggttcaatggcataggtgtcactcagaacgttctttatgagaatcagaaactcatcgcgaaccagtttaattcagcgatcggcaagattcaggactccttgtcctcaactgcgtcagctttgggaaaacttcaagacgtcgtgaaccagaatgctcaggcgctcaataccctggtgaaacaacttagcagtaactttggggctatttctagcggtccaaacgatatactgtcccgactcccgaaagtcgaggccgaagtccaaattgatcgtcttattacagggagactccaatctcttcaaacatatgtcactcaacagctcattagggctgcggagatccgggcttccgcaaatcttgccgcgacaaagatgagtgaatgcgtcttgggacaatctaagagggtggacttttgtggaaaaggttaccatctcatgtccttccctcagtcagcgccccacggagtcgttttcctgcacgtaacgtatgtcccggctcaagagaagaacttcactactgcaccagcgatttgccatgacggtaaagcccattttccccgcgagggcgtatttgtgtccaacggtacccactggttcgtaacccaacggaatttctatgagccccaaatcattacaacagataatacagatgtttccgggaattgcgacgttgttattggcatcgttaacaacaccgtttacgatcccttgcaaccggaactggactcctttaaagaagaactcgacaagtattttaagaaccacacatcaccagatgtcgatcttggcgacatttccggcattaacgcttcagttgtaaatattcagaaagagatagatcgcctgaatgaggtggctaagaacctgaacgaatctctcattgatctccaagagctgggaaagtacgaacaatacatcaaatggccttctgggcgtcgccgaagacgacgagggtccggcggctcagggagcggctatatccctgaggcgcctcgggacggacaagcttatgtgaggaaagatggagaatgggtattgctgtcaaccttcctgggataatga

SEQ ID NO: 93 - RNA, 3840 nt, Artificial Sequence
  Description of Artificial Sequence: Synthetic polynucleotide
ggauccgccaccauggacuggaccuggauucuguuccugguggccgccgccacaagggugcacagcauguuuguuuuccucguccucuugccccucgucucuagucaauguguuaauuugaccacacgaacccaacugccaccugccuacaccaacaguuuuaccagaggaguuuauuaccccgacaaaguauucaggucaucagugcugcauaguacccaagacuuguuucuccccuucuuuaguaacguuacaugguuccacgccauucacgugagugggacaaauggaacaaaacgcuucgacaacccugugcuccccuucaacgaugguguauacuuugcuaguaccgagaagagcggaauuauccgcggguggaucuuuggaacaacacuggacagcaaaacccaaagccugcuuaucguuaacaaugcuacuaacguugugaucaaagugugugaauuccaauuuuguaaugauccguuucucggaguuuacuaccacaagaacaacaaaaguuggauggaaagcgaauuccggguguacuccucagcaaauaauuguaccuuugaguacgugagucaacccuuucucauggaccuggaaggaaaacaaggcaauuucaagaaccugcgggaguuuguguucaagaauauugauggcuauuuuaaaauuuauucuaagcauacuccaaucaaccugguaagggaccugccccaaggcuuuucagcccucgaaccgcuuguagauuugccuaucgggauaaacauuacgcgauuucaaacgcuguuggcgcuccaccggagcuacuugacuccuggcgauagcagcuccgguuggaccgcuggagcggccgcuuauuacgucggcuaucugcaacccaggacguuccugcucaaguauaaugagaacgggacgauuacagaugcaguggauugugcgcuugauccucucucugaaaccaagugcacucucaagucuuucacgguggagaaaggcauuuaucaaacuaguaacuuucgaguacagccuacugagaguaucguuagguucccaaacauuacgaaccucugucccuuuggagaaguauucaaugcuacucgcuuugcaagcguuuaugccuggaaucgcaaacgcaucagcaauugcgucgccgauuauucuguccuuuauaauagcgcaucauuuucaacauuuaaguguuauggggugaguccgacuaagcucaaugauuugugcuucacaaacgucuacgcggacagcuuugugauaaggggcgacgaaguucgccaaaucgcucccggccaaacugggaaaaucgcggauuacaacuauaaauugcccgaugacuucaccggcugugucauugccuggaacucuaauaaccucgauagcaaggugggcgggaacuauaauuauuuguaccgccuguuucgaaaguccaaucucaaacccuuugagcgggacauuuccacugagaucuaucaggcagggaguacaccuuguaacggcguggaaggcuuuaacuguuauuuuccccugcaaaguuacgguuuucaaccuaccaacggaguuggcuaucaaccuuaucgagucgucgugcugaguuuugaguugcugcaugccccagccaccgucuguggaccuaagaaauccaccaaccucgugaagaacaagugcgucaauuuuaauuuuaacggccugacugggaccgguguccucaccgaaucuaauaagaaguuccugccauuucaacaauucggacgggacaucgcuggaacgacagaugcuguccgugauccucagacacuggagauucuggacaucacuccuugcagcuuuggcggagucucuguuauuacucccggaacuaacacuucuaaccaaguugcuguccucuaucaggacgugaacugcacugaagugcccguggcaauccaugcaggccaacugacccccacuuggagagucuacagcacggggagcaaugucuuccaaacaagggccggaugccuuauuggagcggagcacguuaauaacucauacgagugugauauaccaauuggagcaggaauuugugcuuccuaccagacccaaacuaacagucccaggcgggcuaggagugucgcuagccagagcaucaucgcguacacaaugucucucggcgcagaaaacucagucgccuauagcaacaacucaauugccauucccaccaacuucacaauuuccguaaccacugaaauucugccuguuagcaugacaaagacaucaguugauuguacaauguacauauguggagacagcaccgaaugcagcaaccuuuugcuucaauauggcuccuuuuguacccaacucaacagggcacucacugggauagcagucgaacaagauaagaacacccaagagguguuugcacaagucaaacaaaucuauaaaacgccgcccauaaaagacuuuggcggauucaauuucagccagaucuugccugacccauccaagccuucaaagaggagcuuuauugaggaucuucucuucaauaaagugacacuggcggacgccgguuuuaucaagcaauauggugauugucucggugacauagcagcuagagaucugauuugcgcucagaaauuuaauggccuuacugugcuucccccacugcugaccgaugaaaugauugcacaauauacaagcgcccuuuuggccgggacuauuacuuccggguggaccuucggcgccggcgccgcucugcaaauuccuuucgcaaugcagauggccuaccgguucaauggcauaggugucacucagaacguucuuuaugagaaucagaaacucaucgcgaaccaguuuaauucagcgaucggcaagauucaggacuccuuguccucaacugcgucagcuuugggaaaacuucaagacgucgugaaccagaaugcucaggcgcucaauacccuggugaaacaacuuagcaguaacuuuggggcuauuucuagcgguccaaacgauauacugucccgacucccgaaagucgaggccgaaguccaaauugaucgucuuauuacagggagacuccaaucucuucaaacauaugucacucaacagcucauuagggcugcggagauccgggcuuccgcaaaucuugccgcgacaaagaugagugaaugcgucuugggacaaucuaagaggguggacuuuuguggaaaagguuaccaucucauguccuucccucagucagcgccccacggagucguuuuccugcacguaacguaugucccggcucaagagaagaacuucacuacugcaccagcgauuugccaugacgguaaagcccauuuuccccgcgagggcguauuuguguccaacgguacccacugguucguaacccaacggaauuucuaugagccccaaaucauuacaacagauaauacagauguuuccgggaauugcgacguuguuauuggcaucguuaacaacaccguuuacgaucccuugcaaccggaacuggacuccuuuaaagaagaacucgacaaguauuuuaagaaccacacaucaccagaugucgaucuuggcgacauuuccggcauuaacgcuucaguuguaaauauucagaaagagauagaucgccugaaugagguggcuaagaaccugaacgaaucucucauugaucuccaagagcugggaaaguacgaacaauacaucaaauggccuucugggcgucgccgaagacgacgaggguccggcggcucagggagcggcuauaucccugaggcgccucgggacggacaagcuuaugugaggaaagauggagaauggguauugcugucaaccuuccugggauaauga

SEQ ID NO: 94 - protein, 1274 aa, Artificial Sequence
  Description of Artificial Sequence: Synthetic polypeptide
MDWTWILFLVAAATRVHSMFVFLVLLPLVSSQCVNLTTRTQLPPAYTNSFTRGVYYPDKVFRSSVLHSTQDLFLPFFSNVTWFHAIHVSGTNGTKRFDNPVLPFNDGVYFASTEKSGIIRGWIFGTTLDSKTQSLLIVNNATNVVIKVCEFQFCNDPFLGVYYHKNNKSWMESEFRVYSSANNCTFEYVSQPFLMDLEGKQGNFKNLREFVFKNIDGYFKIYSKHTPINLVRDLPQGFSALEPLVDLPIGINITRFQTLLALHRSYLTPGDSSSGWTAGAAAYYVGYLQPRTFLLKYNENGTITDAVDCALDPLSETKCTLKSFTVEKGIYQTSNFRVQPTESIVRFPNITNLCPFGEVFNATRFASVYAWNRKRISNCVADYSVLYNSASFSTFKCYGVSPTKLNDLCFTNVYADSFVIRGDEVRQIAPGQTGKIADYNYKLPDDFTGCVIAWNSNNLDSKVGGNYNYLYRLFRKSNLKPFERDISTEIYQAGSTPCNGVEGFNCYFPLQSYGFQPTNGVGYQPYRVVVLSFELLHAPATVCGPKKSTNLVKNKCVNFNFNGLTGTGVLTESNKKFLPFQQFGRDIAGTTDAVRDPQTLEILDITPCSFGGVSVITPGTNTSNQVAVLYQDVNCTEVPVAIHAGQLTPTWRVYSTGSNVFQTRAGCLIGAEHVNNSYECDIPIGAGICASYQTQTNSPRRARSVASQSIIAYTMSLGAENSVAYSNNSIAIPTNFTISVTTEILPVSMTKTSVDCTMYICGDSTECSNLLLQYGSFCTQLNRALTGIAVEQDKNTQEVFAQVKQIYKTPPIKDFGGFNFSQILPDPSKPSKRSFIEDLLFNKVTLADAGFIKQYGDCLGDIAARDLICAQKFNGLTVLPPLLTDEMIAQYTSALLAGTITSGWTFGAGAALQIPFAMQMAYRFNGIGVTQNVLYENQKLIANQFNSAIGKIQDSLSSTASALGKLQDVVNQNAQALNTLVKQLSSNFGAISSGPNDILSRLPKVEAEVQIDRLITGRLQSLQTYVTQQLIRAAEIRASANLAATKMSECVLGQSKRVDFCGKGYHLMSFPQSAPHGVVFLHVTYVPAQEKNFTTAPAICHDGKAHFPREGVFVSNGTHWFVTQRNFYEPQIITTDNTDVSGNCDVVIGIVNNTVYDPLQPELDSFKEELDKYFKNHTSPDVDLGDISGINASVVNIQKEIDRLNEVAKNLNESLIDLQELGKYEQYIKWPSGRRRRRRGSGGSGSGYIPEAPRDGQAYVRKDGEWVLLSTFLG

SEQ ID NO: 95 - DNA, 3810 bp, Artificial Sequence
  Description of Artificial Sequence: Synthetic polynucleotide
gccaccatggactggacctggatactctttctcgtagcagcagccacacgagtgcattcaagccaatgcgtgaatctgactacaaggactcagctgccccctgcatacacgaacagtttcacccgcggtgtatattatccggacaaagtattcaggtctagtgtgctgcactcaacccaggatttgtttctgcccttcttctctaacgtgacatggttccacgccatccatgtgtcaggtacgaacggtaccaagagatttgataacccggtactgccatttaatgacggcgtctattttgcttccactgagaagagcaacatcataagaggctggatctttggaactactctggacagcaaaacccagagcttgctgatcgtgaacaacgcgacaaatgtagtgatcaaagtatgtgagtttcaattctgtaacgatcccttccttggggtttattaccataagaataataagagttggatggagtccgaatttagagtttactcctcagctaataactgtacgttcgagtatgtctcccaaccttttcttatggatctcgaagggaaacagggtaactttaagaatcttcgagaatttgtgttcaagaacatcgacggttattttaagatctacagtaagcatactcccataaatctggttagagatctcccgcaaggattttccgcactggagccccttgtagaccttcccattggaataaacataacacgtttccagacactcctcgctctgcataggtcatatctcaccccgggcgattcttccagcggatggaccgctggagctgctgcttactacgtaggatacctgcaaccccggacatttctgctcaagtataacgaaaatgggactattacggacgctgtggactgtgctcttgacccacttagcgagacaaaatgcacgctgaaaagttttaccgtggagaaggggatctatcaaacgagcaattttagggttcagcctaccgaatcaatcgtcagatttcccaatatcactaacctgtgccctttcggggaagttttcaacgcaacccggtttgcgagcgtatacgcttggaatcgcaaaaggataagcaattgcgttgccgattactccgttctttacaattcagcatcattttctacttttaaatgctacggcgtgtctcccacaaaactgaatgacctgtgttttacgaacgtgtatgcagacagctttgtgattaggggtgatgaggttagacaaatcgcaccaggtcagaccggtaagatcgctgattacaactacaaactgcccgatgacttcacaggatgcgtgattgcctggaattccaacaatctggattctaaggttggcggcaattacaattacctgtataggttgtttcggaagtcaaacctgaaacccttcgaaagagacatttctaccgagatttatcaagcgggttcaactccttgtaatggagttgaaggcttcaattgttactttccccttcaatcatacggattccaaccaaccaatggggtcggataccagccatatagggttgttgtcctgtcattcgaacttctccacgcaccagccaccgtatgtggacccaagaagtctactaatctggtgaagaacaaatgcgtcaatttcaactttaatgggttgaccggcactggggtgctgactgaatccaacaagaagtttctgccgttccaacaattcggacgcgatatcgctgatacaaccgatgccgttagagatccccaaacattggagattctggatattacgccttgttcattcggtggtgtttccgtgattacccctggcaccaatacgagtaaccaagtggcggtgctgtatcaagatgtgaactgtactgaagtgccggtggctatacatgccgaccaactcacaccaacatggagagtatatagcacgggttccaatgtgtttcaaactagggctggctgtttgattggcgctgaacatgttaataattcctatgaatgcgatattcccatcggtgccgggatttgcgcaagttatcaaacgcaaactaactcccccgggtcagcatcctctgtcgcttcccaatcaatcatcgcctataccatgagtcttggggcagaaaattccgttgcttattctaacaattccattgcaattcctacgaacttcaccatctcagttactacagaaatacttcccgtgtcaatgacgaagacatccgtagattgcacaatgtatatatgtggggactcaactgaatgctcaaacctgctcctgcaatacggatcattttgcacccaactgaacagagcattgaccggtatagccgtggagcaagataagaacactcaagaagtattcgcccaggtcaaacaaatctataaaactccgcctataaaagattttggcggctttaacttttcccaaatactgcctgacccaagtaagccctcaaaacgtagctttatagaggacctcttgtttaataaggtgacactcgctgacgctggattcattaagcaatatggtgactgcttgggagatattgccgcccgcgatctcatttgtgcacaaaagttcaacggcctcacagtcctgccccctctgctgacggatgaaatgatcgctcaatacacctcagctctcctggcaggcaccataacaagcgggtggacatttggtgccggggcagcactgcaaatcccattcgcaatgcaaatggcttataggttcaatgggatcggcgtaactcaaaatgtcctctacgagaaccagaaactcatagctaaccaattcaattctgcaatcgggaaaatccaggactccctgagctcaacggccagcgcactgggcaagctccaagatgtggtcaaccaaaacgcacaagcactgaatactcttgtgaaacaactcagctccaatttcggggcaatatcaagtgtcctcaatgatattcttagcaggcttgatccacccgaagccgaggtgcagatcgacaggctcataacaggcaggctccagtcccttcaaacgtatgtaactcagcaactgattcgggctgccgagattcgagcttcagctaatttggcagctacgaagatgagcgaatgcgtcctgggacagtctaaaagagtagacttttgcggcaaagggtatcatctgatgagcttcccacaaagtgctccacatggcgtggttttcctgcatgtcacttatgttcccgcacaagagaagaacttcactaccgcaccagcgatctgtcacgatggtaaagcacatttcccgcgggaaggcgtattcgtatctaacggcacccactggttcgttactcaacgcaacttttatgaaccacaaatcattacaaccgataacacttttgtttcaggcaattgcgatgttgtcatcggcattgtgaataacactgtgtacgatccacttcaaccagaattggacagctttaaagaggagcttgataagtatttcaagaatcatacctctcccgacgtggacctcggggacatctctggaataaatgctagcgtcgttaatatacagaaagagattgatcgtctgaacgaagtggctaagaatctgaatgaaagccttatcgatctgcaagaactggggaagtacgaacagggatacataccggaagccccacgcgacggtcaggcttatgttaggaaggatggagaatgggttttgctctccacgtttctcgggcttgaagttttgttccaaggaccctggtcacacccccaatttgagaaacaccatcaccaccatcaccaccactgataa

SEQ ID NO: 96 - RNA, 3810 nt, Artificial Sequence
  Description of Artificial Sequence: Synthetic polynucleotide
gccaccauggacuggaccuggauacucuuucucguagcagcagccacacgagugcauucaagccaaugcgugaaucugacuacaaggacucagcugcccccugcauacacgaacaguuucacccgcgguguauauuauccggacaaaguauucaggucuagugugcugcacucaacccaggauuuguuucugcccuucuucucuaacgugacaugguuccacgccauccaugugucagguacgaacgguaccaagagauuugauaacccgguacugccauuuaaugacggcgucuauuuugcuuccacugagaagagcaacaucauaagaggcuggaucuuuggaacuacucuggacagcaaaacccagagcuugcugaucgugaacaacgcgacaaauguagugaucaaaguaugugaguuucaauucuguaacgaucccuuccuugggguuuauuaccauaagaauaauaagaguuggauggaguccgaauuuagaguuuacuccucagcuaauaacuguacguucgaguaugucucccaaccuuuucuuauggaucucgaagggaaacaggguaacuuuaagaaucuucgagaauuuguguucaagaacaucgacgguuauuuuaagaucuacaguaagcauacucccauaaaucugguuagagaucucccgcaaggauuuuccgcacuggagccccuuguagaccuucccauuggaauaaacauaacacguuuccagacacuccucgcucugcauaggucauaucucaccccgggcgauucuuccagcggauggaccgcuggagcugcugcuuacuacguaggauaccugcaaccccggacauuucugcucaaguauaacgaaaaugggacuauuacggacgcuguggacugugcucuugacccacuuagcgagacaaaaugcacgcugaaaaguuuuaccguggagaaggggaucuaucaaacgagcaauuuuaggguucagccuaccgaaucaaucgucagauuucccaauaucacuaaccugugcccuuucggggaaguuuucaacgcaacccgguuugcgagcguauacgcuuggaaucgcaaaaggauaagcaauugcguugccgauuacuccguucuuuacaauucagcaucauuuucuacuuuuaaaugcuacggcgugucucccacaaaacugaaugaccuguguuuuacgaacguguaugcagacagcuuugugauuaggggugaugagguuagacaaaucgcaccaggucagaccgguaagaucgcugauuacaacuacaaacugcccgaugacuucacaggaugcgugauugccuggaauuccaacaaucuggauucuaagguuggcggcaauuacaauuaccuguauagguuguuucggaagucaaaccugaaacccuucgaaagagacauuucuaccgagauuuaucaagcggguucaacuccuuguaauggaguugaaggcuucaauuguuacuuuccccuucaaucauacggauuccaaccaaccaauggggucggauaccagccauauaggguuguuguccugucauucgaacuucuccacgcaccagccaccguauguggacccaagaagucuacuaaucuggugaagaacaaaugcgucaauuucaacuuuaauggguugaccggcacuggggugcugacugaauccaacaagaaguuucugccguuccaacaauucggacgcgauaucgcugauacaaccgaugccguuagagauccccaaacauuggagauucuggauauuacgccuuguucauucggugguguuuccgugauuaccccuggcaccaauacgaguaaccaaguggcggugcuguaucaagaugugaacuguacugaagugccgguggcuauacaugccgaccaacucacaccaacauggagaguauauagcacggguuccaauguguuucaaacuagggcuggcuguuugauuggcgcugaacauguuaauaauuccuaugaaugcgauauucccaucggugccgggauuugcgcaaguuaucaaacgcaaacuaacucccccgggucagcauccucugucgcuucccaaucaaucaucgccuauaccaugagucuuggggcagaaaauuccguugcuuauucuaacaauuccauugcaauuccuacgaacuucaccaucucaguuacuacagaaauacuucccgugucaaugacgaagacauccguagauugcacaauguauauauguggggacucaacugaaugcucaaaccugcuccugcaauacggaucauuuugcacccaacugaacagagcauugaccgguauagccguggagcaagauaagaacacucaagaaguauucgcccaggucaaacaaaucuauaaaacuccgccuauaaaagauuuuggcggcuuuaacuuuucccaaauacugccugacccaaguaagcccucaaaacguagcuuuauagaggaccucuuguuuaauaaggugacacucgcugacgcuggauucauuaagcaauauggugacugcuugggagauauugccgcccgcgaucucauuugugcacaaaaguucaacggccucacaguccugcccccucugcugacggaugaaaugaucgcucaauacaccucagcucuccuggcaggcaccauaacaagcggguggacauuuggugccggggcagcacugcaaaucccauucgcaaugcaaauggcuuauagguucaaugggaucggcguaacucaaaauguccucuacgagaaccagaaacucauagcuaaccaauucaauucugcaaucgggaaaauccaggacucccugagcucaacggccagcgcacugggcaagcuccaagauguggucaaccaaaacgcacaagcacugaauacucuugugaaacaacucagcuccaauuucggggcaauaucaaguguccucaaugauauucuuagcaggcuugauccacccgaagccgaggugcagaucgacaggcucauaacaggcaggcuccagucccuucaaacguauguaacucagcaacugauucgggcugccgagauucgagcuucagcuaauuuggcagcuacgaagaugagcgaaugcguccugggacagucuaaaagaguagacuuuugcggcaaaggguaucaucugaugagcuucccacaaagugcuccacauggcgugguuuuccugcaugucacuuauguucccgcacaagagaagaacuucacuaccgcaccagcgaucugucacgaugguaaagcacauuucccgcgggaaggcguauucguaucuaacggcacccacugguucguuacucaacgcaacuuuuaugaaccacaaaucauuacaaccgauaacacuuuuguuucaggcaauugcgauguugucaucggcauugugaauaacacuguguacgauccacuucaaccagaauuggacagcuuuaaagaggagcuugauaaguauuucaagaaucauaccucucccgacguggaccucggggacaucucuggaauaaaugcuagcgucguuaauauacagaaagagauugaucgucugaacgaaguggcuaagaaucugaaugaaagccuuaucgaucugcaagaacuggggaaguacgaacagggauacauaccggaagccccacgcgacggucaggcuuauguuaggaaggauggagaauggguuuugcucuccacguuucucgggcuugaaguuuuguuccaaggacccuggucacacccccaauuugagaaacaccaucaccaccaucaccaccacugauaa

SEQ ID NO: 97 - protein, 1266 aa, Artificial Sequence
  Description of Artificial Sequence: Synthetic polypeptide
MDWTWILFLVAAATRVHSSQCVNLTTRTQLPPAYTNSFTRGVYYPDKVFRSSVLHSTQDLFLPFFSNVTWFHAIHVSGTNGTKRFDNPVLPFNDGVYFASTEKSNIIRGWIFGTTLDSKTQSLLIVNNATNVVIKVCEFQFCNDPFLGVYYHKNNKSWMESEFRVYSSANNCTFEYVSQPFLMDLEGKQGNFKNLREFVFKNIDGYFKIYSKHTPINLVRDLPQGFSALEPLVDLPIGINITRFQTLLALHRSYLTPGDSSSGWTAGAAAYYVGYLQPRTFLLKYNENGTITDAVDCALDPLSETKCTLKSFTVEKGIYQTSNFRVQPTESIVRFPNITNLCPFGEVFNATRFASVYAWNRKRISNCVADYSVLYNSASFSTFKCYGVSPTKLNDLCFTNVYADSFVIRGDEVRQIAPGQTGKIADYNYKLPDDFTGCVIAWNSNNLDSKVGGNYNYLYRLFRKSNLKPFERDISTEIYQAGSTPCNGVEGFNCYFPLQSYGFQPTNGVGYQPYRVVVLSFELLHAPATVCGPKKSTNLVKNKCVNFNFNGLTGTGVLTESNKKFLPFQQFGRDIADTTDAVRDPQTLEILDITPCSFGGVSVITPGTNTSNQVAVLYQDVNCTEVPVAIHADQLTPTWRVYSTGSNVFQTRAGCLIGAEHVNNSYECDIPIGAGICASYQTQTNSPGSASSVASQSIIAYTMSLGAENSVAYSNNSIAIPTNFTISVTTEILPVSMTKTSVDCTMYICGDSTECSNLLLQYGSFCTQLNRALTGIAVEQDKNTQEVFAQVKQIYKTPPIKDFGGFNFSQILPDPSKPSKRSFIEDLLFNKVTLADAGFIKQYGDCLGDIAARDLICAQKFNGLTVLPPLLTDEMIAQYTSALLAGTITSGWTFGAGAALQIPFAMQMAYRFNGIGVTQNVLYENQKLIANQFNSAIGKIQDSLSSTASALGKLQDVVNQNAQALNTLVKQLSSNFGAISSVLNDILSRLDPPEAEVQIDRLITGRLQSLQTYVTQQLIRAAEIRASANLAATKMSECVLGQSKRVDFCGKGYHLMSFPQSAPHGVVFLHVTYVPAQEKNFTTAPAICHDGKAHFPREGVFVSNGTHWFVTQRNFYEPQIITTDNTFVSGNCDVVIGIVNNTVYDPLQPELDSFKEELDKYFKNHTSPDVDLGDISGINASVVNIQKEIDRLNEVAKNLNESLIDLQELGKYEQGYIPEAPRDGQAYVRKDGEWVLLSTFLGLEVLFQGPWSHPQFEKHHHHHHHH

SEQ ID NO: 98 - DNA, 3738 bp, Artificial Sequence
  Description of Artificial Sequence: Synthetic polynucleotide
gccaccatggactggacctggatactctttctcgtagcagcagccacacgagtgcattcatcacagtgcgttaatctgaccacccgtacacaactcccacccgcatacacaaatagctttacacgcggagtgtattaccccgataaagtctttcggagctcagtgctccattctactcaagatcttttcctgccgttctttagtaacgttacttggtttcatgcaatacatgtgtctggcacaaacggaaccaaacgttttgataatccggtgttgccatttaatgatggtgtatattttgcttccacggaaaagtcaaacatcatccgtgggtggatctttggcaccactcttgatagcaaatgtcaaagccttctgattgttaataacgctacaaacgtcgtaattaaagtgtgtgaattccagttctgtaatgaccccttcctcggagtatattaccacaagaataacaaatcttggatggagagcgaatttagagtttacagttcagccaataactgtacatttgaatatgtcagtcagcctttcctcatggacctcgaaggtaaacaaggtaattttaagaacttgagagagttcgtgtttaagaacatcgatggctatttcaaaatttactctaagcacacaccaatcaacctggttcgagacctgccccagggtttctcagctttggaaccattggtggacctgccaatcggcattaacattaccagatttcaaactttgttggcactccaccggtcatatcttacccccggagacagttcctcaggctggacggcaggcgccgccgcgtactatgttgggtatctccaaccccgaaccttccttctcaaatacaatgaaaacgggacgattacagatgcagtcgattgcgccctggaccccttgtccgaaactaaatgcactctgaagagtttcacggtagagaagggaatctatcaaacgagcaattttcgagtccaaccaacggaatctattgtgcggtttcccaatatcacaaacctctgtccattcggagaagtctttaatgctaccaggtttgcgtctgtatatgcatggaaccgaaagaggatttccaattgcgtagcggactacagtgtcctttataacagcgcttcattttccacgtttaagtgttatggtgtttctccaacgaaactcaacgacctctgttttactaacgtttacgctgacagctttgttatacgtggggacgaagtcaggcaaattgctcctggacagactggaaagatcgctgattataattataaacttcctgacgatttcaccggctgcgttattgcatggaactccaacaatctggattcaaaagtgggtggaaattataattatctgtataggttgtttcggaagagcaatcttaagccctttgagcgggacatatgtaccgaaatttaccaagcaggctccaccccatgcaatggagtagaagggttcaattgctattttcctctgcaaagttatggctttcaacccaccaacggagttgggtatcaaccttacagggttgtcgtgctgagtttcgaattgctccacgcacccgctacagtatgtggccccaagaagtccactaatcttgttaagaataaatgcgtgaacttcaacttcaatggacttacaggtactggagtactcacggaatcaaacaagaaatttctcccatttcaacagtttggccgagatatagctgacaccacagatgctgttcgcgacccccagacgttggaaatacttgatatcactccctgcagcttcggcggcgtgagcgtgatcactccaggtactaatacgagcaatcaagttgccgttctgtaccaagatgtgaactgcaccgaggttccagtggcaattcacgccgaccaacttactcccacctggcgggtctattccaccggatcaaacgtcttccaaactcgcgctggttgccttatcggtgcagagcacgttaataattcctatgaatgtgacattcccataggagcaggcatctgtgcatcttatcaaacccagactaattcccctggttccgcttcctctgttgcatcccagtccataattgcctacactatgagtctcggggctgaaaattccgtggcctattctaataattcaatcgccatcccaaccaattttaccatatccgtaacgactgaaatacttcctgtcagtatgaccaagacctcagtggactgcaccatgtacatctgcggcgattctactgaatgttccaatctgcttttgcaatatggttcattctgcacccaactcaacagggctcttacagggatcgccgtcgaacaggataagaatacccaggaagtgttcgcccaagttaagcaaatttacaagacaccacccatcaaggacttcggcgggttcaacttcagccaaattctgcccgacccgtctaagccttctaagcgctctttcattgaggatcttttgttcaataaggttacgcttgccgatgcagggtttatcaaacagtatggcgactgtcttggggatatcgcagctagggatcttatttgtgcacagaaatttaatggcctgactgttcttccccctttgctcactgacgagatgattgcccagtacacttcagctctcctggccgggactataacttctggttggaccttcggagctggcgccgccctgcaaattccatttgcaatgcagatggcttatcgcttcaacggaattggggtgacccaaaatgttctctacgagaaccagaaactcattgcaaaccagttcaattctgcgatcgggaagatccaggattccctgtctagtacggctagtgccctcggtaagctccaagacgtcgtcaaccaaaacgcccaggccttgaacacccttgtcaaacaactgagctccaattttggggctattagcagtgtgctgaatgatatcctgtcccgccttgacccaccggaagcggaagtccaaattgatcgactgatcactgggcgtctccaatcccttcaaacttacgtgacccaacaactcatccgagcagctgagattagggctagcgctaaccttgctgctactaagatgtcagagtgtgtcctcggccagtctaagagagtggacttttgtgggaaagggtaccacttgatgtcattcccacaaagcgccccacacggcgtggtgtttctccacgtcacttacgttccagctcaggaaaagaactttaccaccgcccccgctatatgtcatgatgggaaggcccactttcctcgtgaaggtgtctttgtcagcaatggcacacactggtttgtgacccaacggaatttctatgagcctcagattattaccacggataacactttcgtatcagggaattgtgatgtggttatcggcatcgttaataatacagtgtatgacccactgcagccagagcttgacagcttcaaagaagagctcgataagtactttaagaatcatacaagtcctgacgttgatcttggggatattagtgggattaacgccagcgtcgtcaatattcagaaagagattgacaggttgaacgaagtagctaagaatcttaatgaaagcctgatagatttgcaagaacttggtaagtatgagcaggggtacatacccgaggctcctcgggatgggcaggcctatgtacgcaaagacggtgaatgggtattgctcagcacttttctcggctgataa

SEQ ID NO: 99 - RNA, 3738 nt, Artificial Sequence
  Description of Artificial Sequence: Synthetic polynucleotide
gccaccauggacuggaccuggauacucuuucucguagcagcagccacacgagugcauucaucacagugcguuaaucugaccacccguacacaacucccacccgcauacacaaauagcuuuacacgcggaguguauuaccccgauaaagucuuucggagcucagugcuccauucuacucaagaucuuuuccugccguucuuuaguaacguuacuugguuucaugcaauacaugugucuggcacaaacggaaccaaacguuuugauaauccgguguugccauuuaaugaugguguauauuuugcuuccacggaaaagucaaacaucauccguggguggaucuuuggcaccacucuugauagcaaaugucaaagccuucugauuguuaauaacgcuacaaacgucguaauuaaagugugugaauuccaguucuguaaugaccccuuccucggaguauauuaccacaagaauaacaaaucuuggauggagagcgaauuuagaguuuacaguucagccaauaacuguacauuugaauaugucagucagccuuuccucauggaccucgaagguaaacaagguaauuuuaagaacuugagagaguucguguuuaagaacaucgauggcuauuucaaaauuuacucuaagcacacaccaaucaaccugguucgagaccugccccaggguuucucagcuuuggaaccauugguggaccugccaaucggcauuaacauuaccagauuucaaacuuuguuggcacuccaccggucauaucuuacccccggagacaguuccucaggcuggacggcaggcgccgccgcguacuauguuggguaucuccaaccccgaaccuuccuucucaaauacaaugaaaacgggacgauuacagaugcagucgauugcgcccuggaccccuuguccgaaacuaaaugcacucugaagaguuucacgguagagaagggaaucuaucaaacgagcaauuuucgaguccaaccaacggaaucuauugugcgguuucccaauaucacaaaccucuguccauucggagaagucuuuaaugcuaccagguuugcgucuguauaugcauggaaccgaaagaggauuuccaauugcguagcggacuacaguguccuuuauaacagcgcuucauuuuccacguuuaaguguuaugguguuucuccaacgaaacucaacgaccucuguuuuacuaacguuuacgcugacagcuuuguuauacguggggacgaagucaggcaaauugcuccuggacagacuggaaagaucgcugauuauaauuauaaacuuccugacgauuucaccggcugcguuauugcauggaacuccaacaaucuggauucaaaaguggguggaaauuauaauuaucuguauagguuguuucggaagagcaaucuuaagcccuuugagcgggacauauguaccgaaauuuaccaagcaggcuccaccccaugcaauggaguagaaggguucaauugcuauuuuccucugcaaaguuauggcuuucaacccaccaacggaguuggguaucaaccuuacaggguugucgugcugaguuucgaauugcuccacgcacccgcuacaguauguggccccaagaaguccacuaaucuuguuaagaauaaaugcgugaacuucaacuucaauggacuuacagguacuggaguacucacggaaucaaacaagaaauuucucccauuucaacaguuuggccgagauauagcugacaccacagaugcuguucgcgacccccagacguuggaaauacuugauaucacucccugcagcuucggcggcgugagcgugaucacuccagguacuaauacgagcaaucaaguugccguucuguaccaagaugugaacugcaccgagguuccaguggcaauucacgccgaccaacuuacucccaccuggcgggucuauuccaccggaucaaacgucuuccaaacucgcgcugguugccuuaucggugcagagcacguuaauaauuccuaugaaugugacauucccauaggagcaggcaucugugcaucuuaucaaacccagacuaauuccccugguuccgcuuccucuguugcaucccaguccauaauugccuacacuaugagucucggggcugaaaauuccguggccuauucuaauaauucaaucgccaucccaaccaauuuuaccauauccguaacgacugaaauacuuccugucaguaugaccaagaccucaguggacugcaccauguacaucugcggcgauucuacugaauguuccaaucugcuuuugcaauaugguucauucugcacccaacucaacagggcucuuacagggaucgccgucgaacaggauaagaauacccaggaaguguucgcccaaguuaagcaaauuuacaagacaccacccaucaaggacuucggcggguucaacuucagccaaauucugcccgacccgucuaagccuucuaagcgcucuuucauugaggaucuuuuguucaauaagguuacgcuugccgaugcaggguuuaucaaacaguauggcgacugucuuggggauaucgcagcuagggaucuuauuugugcacagaaauuuaauggccugacuguucuucccccuuugcucacugacgagaugauugcccaguacacuucagcucuccuggccgggacuauaacuucugguuggaccuucggagcuggcgccgcccugcaaauuccauuugcaaugcagauggcuuaucgcuucaacggaauuggggugacccaaaauguucucuacgagaaccagaaacucauugcaaaccaguucaauucugcgaucgggaagauccaggauucccugucuaguacggcuagugcccucgguaagcuccaagacgucgucaaccaaaacgcccaggccuugaacacccuugucaaacaacugagcuccaauuuuggggcuauuagcagugugcugaaugauauccugucccgccuugacccaccggaagcggaaguccaaauugaucgacugaucacugggcgucuccaaucccuucaaacuuacgugacccaacaacucauccgagcagcugagauuagggcuagcgcuaaccuugcugcuacuaagaugucagaguguguccucggccagucuaagagaguggacuuuugugggaaaggguaccacuugaugucauucccacaaagcgccccacacggcgugguguuucuccacgucacuuacguuccagcucaggaaaagaacuuuaccaccgcccccgcuauaugucaugaugggaaggcccacuuuccucgugaaggugucuuugucagcaauggcacacacugguuugugacccaacggaauuucuaugagccucagauuauuaccacggauaacacuuucguaucagggaauugugaugugguuaucggcaucguuaauaauacaguguaugacccacugcagccagagcuugacagcuucaaagaagagcucgauaaguacuuuaagaaucauacaaguccugacguugaucuuggggauauuagugggauuaacgccagcgucgucaauauucagaaagagauugacagguugaacgaaguagcuaagaaucuuaaugaaagccugauagauuugcaagaacuugguaaguaugagcagggguacauacccgaggcuccucgggaugggcaggccuauguacgcaaagacggugaauggguauugcucagcacuuuucucggcugauaa

SEQ ID NO: 100 - protein, 1242 aa, Artificial Sequence
  Description of Artificial Sequence: Synthetic polypeptide
MDWTWILFLVAAATRVHSSQCVNLTTRTQLPPAYTNSFTRGVYYPDKVFRSSVLHSTQDLFLPFFSNVTWFHAIHVSGTNGTKRFDNPVLPFNDGVYFASTEKSNIIRGWIFGTTLDSKCQSLLIVNNATNVVIKVCEFQFCNDPFLGVYYHKNNKSWMESEFRVYSSANNCTFEYVSQPFLMDLEGKQGNFKNLREFVFKNIDGYFKIYSKHTPINLVRDLPQGFSALEPLVDLPIGINITRFQTLLALHRSYLTPGDSSSGWTAGAAAYYVGYLQPRTFLLKYNENGTITDAVDCALDPLSETKCTLKSFTVEKGIYQTSNFRVQPTESIVRFPNITNLCPFGEVFNATRFASVYAWNRKRISNCVADYSVLYNSASFSTFKCYGVSPTKLNDLCFTNVYADSFVIRGDEVRQIAPGQTGKIADYNYKLPDDFTGCVIAWNSNNLDSKVGGNYNYLYRLFRKSNLKPFERDICTEIYQAGSTPCNGVEGFNCYFPLQSYGFQPTNGVGYQPYRVVVLSFELLHAPATVCGPKKSTNLVKNKCVNFNFNGLTGTGVLTESNKKFLPFQQFGRDIADTTDAVRDPQTLEILDITPCSFGGVSVITPGTNTSNQVAVLYQDVNCTEVPVAIHADQLTPTWRVYSTGSNVFQTRAGCLIGAEHVNNSYECDIPIGAGICASYQTQTNSPGSASSVASQSIIAYTMSLGAENSVAYSNNSIAIPTNFTISVTTEILPVSMTKTSVDCTMYICGDSTECSNLLLQYGSFCTQLNRALTGIAVEQDKNTQEVFAQVKQIYKTPPIKDFGGFNFSQILPDPSKPSKRSFIEDLLFNKVTLADAGFIKQYGDCLGDIAARDLICAQKFNGLTVLPPLLTDEMIAQYTSALLAGTITSGWTFGAGAALQIPFAMQMAYRFNGIGVTQNVLYENQKLIANQFNSAIGKIQDSLSSTASALGKLQDVVNQNAQALNTLVKQLSSNFGAISSVLNDILSRLDPPEAEVQIDRLITGRLQSLQTYVTQQLIRAAEIRASANLAATKMSECVLGQSKRVDFCGKGYHLMSFPQSAPHGVVFLHVTYVPAQEKNFTTAPAICHDGKAHFPREGVFVSNGTHWFVTQRNFYEPQIITTDNTFVSGNCDVVIGIVNNTVYDPLQPELDSFKEELDKYFKNHTSPDVDLGDISGINASVVNIQKEIDRLNEVAKNLNESLIDLQELGKYEQGYIPEAPRDGQAYVRKDGEWVLLSTFLG

SEQ ID NO: 101 - DNA, 3738 bp, Artificial Sequence
  Description of Artificial Sequence: Synthetic polynucleotide
gccaccatggactggacctggatactctttctcgtagcagcagccacacgagtgcattcatcccagtgcgtgaacctgaccacccgaactcaactcccaccagcatacaccaactcatttacaagaggagtttattacccggacaaggtatttcgaagttcagttcttcacagcacccaagacctgtttctgccattcttcagtaatgtcacttggtttcacgcgatacatgtcagcggtacaaacgggacaaagcgattcgataacccagtactcccattcaacgacggagtgtattttgcatctacagagaaatccaacattatacgcgggtggatctttggaactactctggactccaagacacagagcctgctcattgtgaacaatgcaacgaatgtcgtcataaaagtctgtgaatttcaattttgcaacgatcctttcctcggagtctattaccataagaacaataagagttggatggagagtgagtttcgcgtctattcttccgcgaacaattgtacatttgaatatgtatcacaaccctttcttatggatttggaaggcaaacaaggtaacttcaagaacttgcgcgagttcgtgttcaagaacatagactgttattttaagatctatagtaagcatacgccaatcaatctggtgcgagatttgcctcagggcttttctgctcttgaacccttggttgatctgcccatcgggatcaacataaccagatttcaaacgttgctcgcactccaccgcagctatctcactcctggcgattcctcatctgggtggaccgccggagctgctgcttattacgtcggctatctccagccgcgtactttcctgctcaagtataatgagaatggcaccattaccgatgctgtggattgtgctcttgatccactctctgaaaccaaatgcactctcaagtcttttaccgtggaaaagggtatttatcagacatctaattttcgggtgcaacctactgagtcaattgtacggtttcctaacataactaacctttgtccatttggggaagtcttcaatgccacgcggttcgcatcagtctatgcatggaacagaaaacgtatctccaactgcgtcgccgattattccgtcctttacaatagcgctagcttttccacattcaaatgttatggcgtatcaccaaccaaacttaacgatctctgctttactaatgtctacgctgactctttcgttattcgaggtgacgaggtgcgccaaattgcgcctggtcaaaccggaaagattgccgattataactacaagctccccgacgactttacgggttgtgtgatcgcctggaatagcaataacctcgattctaaagttggcggtaattataactatctgtacagactctttaggaaaagtaatctcaagcccttttgcagggatatctcaaccgaaatctaccaagccggcagcactccttgcaatggtgtcgaggggtttaattgttatttcccactgcaatcttacggctttcaaccgactaatggagtcggttatcaaccctatagggtggtggtactctcctttgaacttttgcacgctccggcaacagtttgtggaccaaagaaaagtacgaaccttgttaagaataagtgtgttaatttcaattttaacggcctcactggaacaggtgtcctcacagaaagcaacaagaagtttctccctttccaacagtttggacgggatatcgccgacactactgacgccgtcagagatcctcaaactctcgaaatcttggatatcacaccatgttctttcggtggtgtctccgtcataacaccaggaactaacacctctaatcaagtggccgtgctctatcaggacgtcaattgcacagaagtgcctgtcgcaatccatgctgatcagctcactcccacctggcgtgtgtattccactggctctaatgtctttcagacacgggcaggttgccttattggggcagagcatgtgaacaattcctacgaatgcgatatacccattggggcaggcatttgcgccagctaccaaacccaaactaacagccccgggagtgccagcagcgtggcatctcagtccattattgcctatacgatgagcctgggtgctgaaaatagcgtggcttatagtaataactctatcgccatacccacaaacttcaccatttcagtgaccaccgaaatccttcctgtttctatgaccaaaacgtccgtcgattgtacaatgtacatttgcggcgatagcactgaatgttcaaacctgctcctgcaatacggctctttctgtactcagctcaaccgggcactcaccggcatagccgtcgaacaagacaagaatacccaggaagtctttgcgcaggtgaaacaaatctataagaccccaccaataaaagatttcggcggttttaatttcagccaaatcttgcctgatcccagcaagccatctaaacggtctttcattgaagatctcctgttcaacaaggttacgctggctgacgccgggtttattaagcaatatggcgattgccttggggacattgccgcacgagacctcatttgtgcccagaaattcaacgggctcaccgtattgcccccgctcctcacagacgaaatgatcgcccaatatacaagcgccctgcttgcgggaaccattacaagcggttggacctttggtgccggcgcagctctgcaaatacccttcgcaatgcaaatggcatatcggtttaatggaattggcgtaacccaaaacgtgctgtatgaaaaccagaaactgatcgcaaatcaattcaatagtgctataggaaagatccaagacagtctgtcttccactgctagcgcgctggggaagctccaagacgttgtgaaccaaaacgcgcaggccctgaataccctggtgaagcaactttcaagcaatttcggtgctatatcttctgtcctcaatgacattctctctcggctcgatcccccggaagccgaagttcagatagaccgtttgatcacaggccgcttgcaatccctgcaaacctacgttacacaacaactgattcgcgccgccgaaattcgggcatccgccaatctggccgcaaccaaaatgtccgagtgtgttctcggtcaatccaaacgcgtggatttctgcggaaaaggataccatttgatgtcatttccacaatcagctccacacggtgttgtattcctgcacgtgacctacgtgccagcccaggagaagaattttactactgcgcccgccatttgtcatgacgggaaggctcattttcctcgggaaggggttttcgtctcaaacggtacccattggttcgtgactcagaggaacttttatgaacctcaaatcataacgaccgataacacgtttgtaagtggcaattgcgacgtggtcatcgggattgtaaacaatactgtctatgaccctctccaaccagagcttgacagctttaaagaagagcttgataaatactttaagaaccatacctcaccagacgtcgatttgggagatatcagtggcattaatgcctctgtcgtcaatatccagaaagagattgaccgcttgaacgaagttgccaagaatcttaatgagtctctgattgacttgcaagaattgggaaaatatgaacaaggatatattccagaagcccctcgcgatgggcaagcatatgttcgaaaggatggggaatgggtgctgctcagcacctttctcggttgataa

SEQ ID NO: 102 - RNA, 3738 nt, Artificial Sequence
  Description of Artificial Sequence: Synthetic polynucleotide
gccaccauggacuggaccuggauacucuuucucguagcagcagccacacgagugcauucaucccagugcgugaaccugaccacccgaacucaacucccaccagcauacaccaacucauuuacaagaggaguuuauuacccggacaagguauuucgaaguucaguucuucacagcacccaagaccuguuucugccauucuucaguaaugucacuugguuucacgcgauacaugucagcgguacaaacgggacaaagcgauucgauaacccaguacucccauucaacgacggaguguauuuugcaucuacagagaaauccaacauuauacgcggguggaucuuuggaacuacucuggacuccaagacacagagccugcucauugugaacaaugcaacgaaugucgucauaaaagucugugaauuucaauuuugcaacgauccuuuccucggagucuauuaccauaagaacaauaagaguuggauggagagugaguuucgcgucuauucuuccgcgaacaauuguacauuugaauauguaucacaacccuuucuuauggauuuggaaggcaaacaagguaacuucaagaacuugcgcgaguucguguucaagaacauagacuguuauuuuaagaucuauaguaagcauacgccaaucaaucuggugcgagauuugccucagggcuuuucugcucuugaacccuugguugaucugcccaucgggaucaacauaaccagauuucaaacguugcucgcacuccaccgcagcuaucucacuccuggcgauuccucaucuggguggaccgccggagcugcugcuuauuacgucggcuaucuccagccgcguacuuuccugcucaaguauaaugagaauggcaccauuaccgaugcuguggauugugcucuugauccacucucugaaaccaaaugcacucucaagucuuuuaccguggaaaaggguauuuaucagacaucuaauuuucgggugcaaccuacugagucaauuguacgguuuccuaacauaacuaaccuuuguccauuuggggaagucuucaaugccacgcgguucgcaucagucuaugcauggaacagaaaacguaucuccaacugcgucgccgauuauuccguccuuuacaauagcgcuagcuuuuccacauucaaauguuauggcguaucaccaaccaaacuuaacgaucucugcuuuacuaaugucuacgcugacucuuucguuauucgaggugacgaggugcgccaaauugcgccuggucaaaccggaaagauugccgauuauaacuacaagcuccccgacgacuuuacggguugugugaucgccuggaauagcaauaaccucgauucuaaaguuggcgguaauuauaacuaucuguacagacucuuuaggaaaaguaaucucaagcccuuuugcagggauaucucaaccgaaaucuaccaagccggcagcacuccuugcaauggugucgagggguuuaauuguuauuucccacugcaaucuuacggcuuucaaccgacuaauggagucgguuaucaacccuauaggguggugguacucuccuuugaacuuuugcacgcuccggcaacaguuuguggaccaaagaaaaguacgaaccuuguuaagaauaaguguguuaauuucaauuuuaacggccucacuggaacagguguccucacagaaagcaacaagaaguuucucccuuuccaacaguuuggacgggauaucgccgacacuacugacgccgucagagauccucaaacucucgaaaucuuggauaucacaccauguucuuucgguggugucuccgucauaacaccaggaacuaacaccucuaaucaaguggccgugcucuaucaggacgucaauugcacagaagugccugucgcaauccaugcugaucagcucacucccaccuggcguguguauuccacuggcucuaaugucuuucagacacgggcagguugccuuauuggggcagagcaugugaacaauuccuacgaaugcgauauacccauuggggcaggcauuugcgccagcuaccaaacccaaacuaacagccccgggagugccagcagcguggcaucucaguccauuauugccuauacgaugagccugggugcugaaaauagcguggcuuauaguaauaacucuaucgccauacccacaaacuucaccauuucagugaccaccgaaauccuuccuguuucuaugaccaaaacguccgucgauuguacaauguacauuugcggcgauagcacugaauguucaaaccugcuccugcaauacggcucuuucuguacucagcucaaccgggcacucaccggcauagccgucgaacaagacaagaauacccaggaagucuuugcgcaggugaaacaaaucuauaagaccccaccaauaaaagauuucggcgguuuuaauuucagccaaaucuugccugaucccagcaagccaucuaaacggucuuucauugaagaucuccuguucaacaagguuacgcuggcugacgccggguuuauuaagcaauauggcgauugccuuggggacauugccgcacgagaccucauuugugcccagaaauucaacgggcucaccguauugcccccgcuccucacagacgaaaugaucgcccaauauacaagcgcccugcuugcgggaaccauuacaagcgguuggaccuuuggugccggcgcagcucugcaaauacccuucgcaaugcaaauggcauaucgguuuaauggaauuggcguaacccaaaacgugcuguaugaaaaccagaaacugaucgcaaaucaauucaauagugcuauaggaaagauccaagacagucugucuuccacugcuagcgcgcuggggaagcuccaagacguugugaaccaaaacgcgcaggcccugaauacccuggugaagcaacuuucaagcaauuucggugcuauaucuucuguccucaaugacauucucucucggcucgaucccccggaagccgaaguucagauagaccguuugaucacaggccgcuugcaaucccugcaaaccuacguuacacaacaacugauucgcgccgccgaaauucgggcauccgccaaucuggccgcaaccaaaauguccgaguguguucucggucaauccaaacgcguggauuucugcggaaaaggauaccauuugaugucauuuccacaaucagcuccacacgguguuguauuccugcacgugaccuacgugccagcccaggagaagaauuuuacuacugcgcccgccauuugucaugacgggaaggcucauuuuccucgggaagggguuuucgucucaaacgguacccauugguucgugacucagaggaacuuuuaugaaccucaaaucauaacgaccgauaacacguuuguaaguggcaauugcgacguggucaucgggauuguaaacaauacugucuaugacccucuccaaccagagcuugacagcuuuaaagaagagcuugauaaauacuuuaagaaccauaccucaccagacgucgauuugggagauaucaguggcauuaaugccucugucgucaauauccagaaagagauugaccgcuugaacgaaguugccaagaaucuuaaugagucucugauugacuugcaagaauugggaaaauaugaacaaggauauauuccagaagccccucgcgaugggcaagcauauguucgaaaggauggggaaugggugcugcucagcaccuuucucgguugauaa

SEQ ID NO: 103 - protein, 1242 aa, Artificial Sequence
  Description of Artificial Sequence: Synthetic polypeptide
MDWTWILFLVAAATRVHSSQCVNLTTRTQLPPAYTNSFTRGVYYPDKVFRSSVLHSTQDLFLPFFSNVTWFHAIHVSGTNGTKRFDNPVLPFNDGVYFASTEKSNIIRGWIFGTTLDSKTQSLLIVNNATNVVIKVCEFQFCNDPFLGVYYHKNNKSWMESEFRVYSSANNCTFEYVSQPFLMDLEGKQGNFKNLREFVFKNIDCYFKIYSKHTPINLVRDLPQGFSALEPLVDLPIGINITRFQTLLALHRSYLTPGDSSSGWTAGAAAYYVGYLQPRTFLLKYNENGTITDAVDCALDPLSETKCTLKSFTVEKGIYQTSNFRVQPTESIVRFPNITNLCPFGEVFNATRFASVYAWNRKRISNCVADYSVLYNSASFSTFKCYGVSPTKLNDLCFTNVYADSFVIRGDEVRQIAPGQTGKIADYNYKLPDDFTGCVIAWNSNNLDSKVGGNYNYLYRLFRKSNLKPFCRDISTEIYQAGSTPCNGVEGFNCYFPLQSYGFQPTNGVGYQPYRVVVLSFELLHAPATVCGPKKSTNLVKNKCVNFNFNGLTGTGVLTESNKKFLPFQQFGRDIADTTDAVRDPQTLEILDITPCSFGGVSVITPGTNTSNQVAVLYQDVNCTEVPVAIHADQLTPTWRVYSTGSNVFQTRAGCLIGAEHVNNSYECDIPIGAGICASYQTQTNSPGSASSVASQSIIAYTMSLGAENSVAYSNNSIAIPTNFTISVTTEILPVSMTKTSVDCTMYICGDSTECSNLLLQYGSFCTQLNRALTGIAVEQDKNTQEVFAQVKQIYKTPPIKDFGGFNFSQILPDPSKPSKRSFIEDLLFNKVTLADAGFIKQYGDCLGDIAARDLICAQKFNGLTVLPPLLTDEMIAQYTSALLAGTITSGWTFGAGAALQIPFAMQMAYRFNGIGVTQNVLYENQKLIANQFNSAIGKIQDSLSSTASALGKLQDVVNQNAQALNTLVKQLSSNFGAISSVLNDILSRLDPPEAEVQIDRLITGRLQSLQTYVTQQLIRAAEIRASANLAATKMSECVLGQSKRVDFCGKGYHLMSFPQSAPHGVVFLHVTYVPAQEKNFTTAPAICHDGKAHFPREGVFVSNGTHWFVTQRNFYEPQIITTDNTFVSGNCDVVIGIVNNTVYDPLQPELDSFKEELDKYFKNHTSPDVDLGDISGINASVVNIQKEIDRLNEVAKNLNESLIDLQELGKYEQGYIPEAPRDGQAYVRKDGEWVLLSTFLG

SEQ ID NO: 104 - DNA, 3747 bp, Artificial Sequence
  Description of Artificial Sequence: Synthetic polynucleotide
gccaccatggattggacctggatacttttcctcgtggccgcagcaacaagagtccactcctctcagtgcgttaacctgactactagaacccaattgcccccggcatacacaaactctttcacccggggtgtctactatcccgacaaagtgtttagaagtagcgtgctgcacagcacccaagatctctttctgccattcttctcaaacgtcacctggtttcacgccatccatgtaagcgggaccaacggcacaaagcgttttgataaccctgttttgccattcaatgatggcgtgtattttgcttccactgagaaaagcaacatcattagagggtggatatttggcacaacgcttgactccaagacgcagagtcttttgatagtaaacaacgcaactaatgtggtcattaaagtctgtgaatttcaattttgcaatgaccccttccttggagtctattaccacaagaacaacaaaagctggatggaaagcgaatttagggtctacagctctgccaataactgcacattcgaatacgtcagccaaccattcttgatggacctggaaggcaagcaaggaaactttaagaatctgagggaatttgtgtttaagaatatcgacggatattttaagatctattccaagcatactcccattaatctcgttcgtgaccttcctcagggtttctctgcattggaacccctcgtagatttgcccattgggattaatatcactagattccagacgctgcttgcactccatcgatcttatctgacccctggtgactcctcttccgggtggacggcgggtgctgcagcctactacgttggctatttgcaacctaggacctttctgttgaagtataatgagaatgggactattactgatgccgttgattgcgccctcgatccgctgtcagaaacaaagtgcaccctgaagagcttcacagtagaaaagggaatctatcaaacctcaaatttccgcgttcaaccaactgaatcaatcgtgcgttttcctaacatcacaaatctgtgtccgtttggagaagtatttaatgcgacgcgtttcgcaagcgtctacgcgtggaatcgcaaacgtatctctaattgcgtagcagattattctgtgctgtacaatagcgcatctttctcaacgtttaagtgctacggcgttaatgggaccaagctgaatgatctctgtttcactaatgtgtacgcagacagttttgtaattagaggagacgaggttaggcaaatagcaccgggtcaaactggcaaaatcgccgactataactacaagctccctgatgacttcacgggctgcgtaattgcttggaactctaataacctggactctaaagtcggcgggaattataattatctctatcggttgtttcgaaaatccaatctcaaaccctttgagcgggacatcaatactacaatttatcaagctggtagtactccttgcaatggggtagaaggcttcaattgttatttcccccttcaatcttacggatttcaacccacgaacggcgtagggtaccagccctatcgagtggtggtactgtcattcgaacttaatcacgccccagcaacagtctgcgggcctaagaaaagcacgaatcttgtcaagaataagtgtgtaaatttcaacttcaatggtcttacaggcacgggagtgctcactgagtctaataagaaatttcttcctttccaacaattcggtcgtgatattgccgatactactgatgcagtccgagatccacaaactctcgaaatcctcgatattactccttgtagttttggcggcgtctccgtgatcaccccagggaccaacactagtaaccaagtggcggtgctctaccaagatgttaactgcacagaagtcccggtagcgatccatgccgaccagctcactcccacatggcgtgtttacagcacagggtcaaacgttttccagacccgtgccggatgtcttataggagccgaacacgtaaataacagttatgaatgcgatatcccaattggtgcaggtatctgtgcgtcatatcaaacccaaactaattctccggggtccgcctcaagcgttgcctcacaatcaataatcgcctacacaatgtccctcggtgccgaaaattcagtcgcttactctaacaatagcattgctatccctaccaacttcactatttctgttaccacggaaattttgcctgtatccatgaccaaaacatctgttgattgcacgatgtacatctgcggggattctaccgaatgttctaacctgcttctgcaatacggctccttctgcacccaattgaaccgcgcactgactgggattgctgtggaacaagacaagaatactcaagaagtatttgcccaggtcaaacagatttacaaaactcccccaattaaagatttcggcggtttcaattttagtcaaattctgccagatccaagtaagccatccaaacgctcatttattgaggacctgctctttaataaagtcacgctggccgacgccggcttcataaaacagtatggcgattgtcttggagacatcgccgcccgcgacctcatttgcgcacaaaagttcaatgggctcaccgtgttgccaccactgctcacagatgagatgatcgcacagtacacgagcgcccttcttgccggcactatcacgtctggttggacgttcggtgccggagccgctctgcaaattccctttgcaatgcaaatggcctatagatttaatggaattggcgtaacacagaacgtgttgtacgagaaccagaagctcattgccaaccagttcaattccgctattggcaaaatacaagactctctcagctcaactgctagcgcactgggaaaattgcaagacgtagtcaatcaaaatgcccaagccctcaatactctcgtcaaacagttgtcttccaactttggggctatcagtagtgtactcaatgacattctttcaagactggacccgcccgaggcggaagtccaaattgatcgtctgataactggaaggttgcaaagccttcagacctacgttacgcaacaacttattagggctgccgaaataagggcatccgctaatctggcagctacaaagatgtctgaatgtgttttgggacagagcaaacgggttgacttctgcggtaaaggttaccatctcatgtcttttccacaaagcgcaccgcacggagtcgtcttcctgcatgtaacatacgtcccagcccaagaaaagaattttaccacagccccagccatctgccacgacggcaaggcgcatttcccaagggaaggcgtgtttgtatccaacgggacgcattggtttgtcactcaaaggaacttttacgaaccccaaattattaccactgataacaccttcgtttctgggaactgtgatgtcgtgattgggatagtaaacaacacggtatatgatccactgcaaccagaactggattccttcaaagaagagctggacaaatacttcaagaatcatactagtcctgacgtcgacctgggcgatatcagtggaatcaacgctagcgtcgtaaacattcaaaaggagatcgatagacttaacgaggtcgccaagaatctcaatgaaagcctcatcgatttgcaagaactcggaaaatatgagcaaagcggatcagggtacattccggaagcccccagggacggacaggcatatgtccgcaaggacggagaatgggttcttcttagcacttttctggggtaatga

SEQ ID NO: 105 - RNA, 3747 nt, Artificial Sequence
  Description of Artificial Sequence: Synthetic polynucleotide
gccaccauggauuggaccuggauacuuuuccucguggccgcagcaacaagaguccacuccucucagugcguuaaccugacuacuagaacccaauugcccccggcauacacaaacucuuucacccggggugucuacuaucccgacaaaguguuuagaaguagcgugcugcacagcacccaagaucucuuucugccauucuucucaaacgucaccugguuucacgccauccauguaagcgggaccaacggcacaaagcguuuugauaacccuguuuugccauucaaugauggcguguauuuugcuuccacugagaaaagcaacaucauuagaggguggauauuuggcacaacgcuugacuccaagacgcagagucuuuugauaguaaacaacgcaacuaauguggucauuaaagucugugaauuucaauuuugcaaugaccccuuccuuggagucuauuaccacaagaacaacaaaagcuggauggaaagcgaauuuagggucuacagcucugccaauaacugcacauucgaauacgucagccaaccauucuugauggaccuggaaggcaagcaaggaaacuuuaagaaucugagggaauuuguguuuaagaauaucgacggauauuuuaagaucuauuccaagcauacucccauuaaucucguucgugaccuuccucaggguuucucugcauuggaaccccucguagauuugcccauugggauuaauaucacuagauuccagacgcugcuugcacuccaucgaucuuaucugaccccuggugacuccucuuccggguggacggcgggugcugcagccuacuacguuggcuauuugcaaccuaggaccuuucuguugaaguauaaugagaaugggacuauuacugaugccguugauugcgcccucgauccgcugucagaaacaaagugcacccugaagagcuucacaguagaaaagggaaucuaucaaaccucaaauuuccgcguucaaccaacugaaucaaucgugcguuuuccuaacaucacaaaucuguguccguuuggagaaguauuuaaugcgacgcguuucgcaagcgucuacgcguggaaucgcaaacguaucucuaauugcguagcagauuauucugugcuguacaauagcgcaucuuucucaacguuuaagugcuacggcguuaaugggaccaagcugaaugaucucuguuucacuaauguguacgcagacaguuuuguaauuagaggagacgagguuaggcaaauagcaccgggucaaacuggcaaaaucgccgacuauaacuacaagcucccugaugacuucacgggcugcguaauugcuuggaacucuaauaaccuggacucuaaagucggcgggaauuauaauuaucucuaucgguuguuucgaaaauccaaucucaaacccuuugagcgggacaucaauacuacaauuuaucaagcugguaguacuccuugcaaugggguagaaggcuucaauuguuauuucccccuucaaucuuacggauuucaacccacgaacggcguaggguaccagcccuaucgaguggugguacugucauucgaacuuaaucacgccccagcaacagucugcgggccuaagaaaagcacgaaucuugucaagaauaaguguguaaauuucaacuucaauggucuuacaggcacgggagugcucacugagucuaauaagaaauuucuuccuuuccaacaauucggucgugauauugccgauacuacugaugcaguccgagauccacaaacucucgaaauccucgauauuacuccuuguaguuuuggcggcgucuccgugaucaccccagggaccaacacuaguaaccaaguggcggugcucuaccaagauguuaacugcacagaagucccgguagcgauccaugccgaccagcucacucccacauggcguguuuacagcacagggucaaacguuuuccagacccgugccggaugucuuauaggagccgaacacguaaauaacaguuaugaaugcgauaucccaauuggugcagguaucugugcgucauaucaaacccaaacuaauucuccgggguccgccucaagcguugccucacaaucaauaaucgccuacacaaugucccucggugccgaaaauucagucgcuuacucuaacaauagcauugcuaucccuaccaacuucacuauuucuguuaccacggaaauuuugccuguauccaugaccaaaacaucuguugauugcacgauguacaucugcggggauucuaccgaauguucuaaccugcuucugcaauacggcuccuucugcacccaauugaaccgcgcacugacugggauugcuguggaacaagacaagaauacucaagaaguauuugcccaggucaaacagauuuacaaaacucccccaauuaaagauuucggcgguuucaauuuuagucaaauucugccagauccaaguaagccauccaaacgcucauuuauugaggaccugcucuuuaauaaagucacgcuggccgacgccggcuucauaaaacaguauggcgauugucuuggagacaucgccgcccgcgaccucauuugcgcacaaaaguucaaugggcucaccguguugccaccacugcucacagaugagaugaucgcacaguacacgagcgcccuucuugccggcacuaucacgucugguuggacguucggugccggagccgcucugcaaauucccuuugcaaugcaaauggccuauagauuuaauggaauuggcguaacacagaacguguuguacgagaaccagaagcucauugccaaccaguucaauuccgcuauuggcaaaauacaagacucucucagcucaacugcuagcgcacugggaaaauugcaagacguagucaaucaaaaugcccaagcccucaauacucucgucaaacaguugucuuccaacuuuggggcuaucaguaguguacucaaugacauucuuucaagacuggacccgcccgaggcggaaguccaaauugaucgucugauaacuggaagguugcaaagccuucagaccuacguuacgcaacaacuuauuagggcugccgaaauaagggcauccgcuaaucuggcagcuacaaagaugucugaauguguuuugggacagagcaaacggguugacuucugcgguaaagguuaccaucucaugucuuuuccacaaagcgcaccgcacggagucgucuuccugcauguaacauacgucccagcccaagaaaagaauuuuaccacagccccagccaucugccacgacggcaaggcgcauuucccaagggaaggcguguuuguauccaacgggacgcauugguuugucacucaaaggaacuuuuacgaaccccaaauuauuaccacugauaacaccuucguuucugggaacugugaugucgugauugggauaguaaacaacacgguauaugauccacugcaaccagaacuggauuccuucaaagaagagcuggacaaauacuucaagaaucauacuaguccugacgucgaccugggcgauaucaguggaaucaacgcuagcgucguaaacauucaaaaggagaucgauagacuuaacgaggucgccaagaaucucaaugaaagccucaucgauuugcaagaacucggaaaauaugagcaaagcggaucaggguacauuccggaagcccccagggacggacaggcauauguccgcaaggacggagaauggguucuucuuagcacuuuucugggguaauga

SEQ ID NO: 106 - protein, 1245 aa, Artificial Sequence
  Description of Artificial Sequence: Synthetic polypeptide
MDWTWILFLVAAATRVHSSQCVNLTTRTQLPPAYTNSFTRGVYYPDKVFRSSVLHSTQDLFLPFFSNVTWFHAIHVSGTNGTKRFDNPVLPFNDGVYFASTEKSNIIRGWIFGTTLDSKTQSLLIVNNATNVVIKVCEFQFCNDPFLGVYYHKNNKSWMESEFRVYSSANNCTFEYVSQPFLMDLEGKQGNFKNLREFVFKNIDGYFKIYSKHTPINLVRDLPQGFSALEPLVDLPIGINITRFQTLLALHRSYLTPGDSSSGWTAGAAAYYVGYLQPRTFLLKYNENGTITDAVDCALDPLSETKCTLKSFTVEKGIYQTSNFRVQPTESIVRFPNITNLCPFGEVFNATRFASVYAWNRKRISNCVADYSVLYNSASFSTFKCYGVNGTKLNDLCFTNVYADSFVIRGDEVRQIAPGQTGKIADYNYKLPDDFTGCVIAWNSNNLDSKVGGNYNYLYRLFRKSNLKPFERDINTTIYQAGSTPCNGVEGFNCYFPLQSYGFQPTNGVGYQPYRVVVLSFELNHAPATVCGPKKSTNLVKNKCVNFNFNGLTGTGVLTESNKKFLPFQQFGRDIADTTDAVRDPQTLEILDITPCSFGGVSVITPGTNTSNQVAVLYQDVNCTEVPVAIHADQLTPTWRVYSTGSNVFQTRAGCLIGAEHVNNSYECDIPIGAGICASYQTQTNSPGSASSVASQSIIAYTMSLGAENSVAYSNNSIAIPTNFTISVTTEILPVSMTKTSVDCTMYICGDSTECSNLLLQYGSFCTQLNRALTGIAVEQDKNTQEVFAQVKQIYKTPPIKDFGGFNFSQILPDPSKPSKRSFIEDLLFNKVTLADAGFIKQYGDCLGDIAARDLICAQKFNGLTVLPPLLTDEMIAQYTSALLAGTITSGWTFGAGAALQIPFAMQMAYRFNGIGVTQNVLYENQKLIANQFNSAIGKIQDSLSSTASALGKLQDVVNQNAQALNTLVKQLSSNFGAISSVLNDILSRLDPPEAEVQIDRLITGRLQSLQTYVTQQLIRAAEIRASANLAATKMSECVLGQSKRVDFCGKGYHLMSFPQSAPHGVVFLHVTYVPAQEKNFTTAPAICHDGKAHFPREGVFVSNGTHWFVTQRNFYEPQIITTDNTFVSGNCDVVIGIVNNTVYDPLQPELDSFKEELDKYFKNHTSPDVDLGDISGINASVVNIQKEIDRLNEVAKNLNESLIDLQELGKYEQSGSGYIPEAPRDGQAYVRKDGEWVLLSTFLG

SEQ ID NO: 107 - DNA, 3834 bp, Artificial Sequence
  Description of Artificial Sequence: Synthetic polynucleotide
gccaccatggactggacctggatactctttctcgtagcagcagccacacgagtgcattcaatgttcgttttcctcgtgctcttgcctttggtttcttctcagtgcgtaaacctcacgactcgaacccaactgcccccagcttatacaaattcctttacgcggggcgtctattacccggataaggttttcagatccagcgtgctgcatagtacacaagatctctttcttcctttcttctcaaatgtaacctggtttcacgctattcatgtatccggcaccaatggaactaaaagatttgataacccggtgttgcccttcaatgatggtgtgtatttcgcttccacggaaaagtcaaacatcatcagagggtggatattcggcacaacattggattccaagtgccagtcactcctcatagtgaacaatgctactaacgtggttataaaggtctgcgaatttcaattttgtaatgatcctttcctcggtgtttactatcacaagaacaataagtcctggatggaatcagaattccgtgtatacagttctgcgaacaattgcacattcgaatatgtgtcccaaccctttctcatggatctggaagggaagcagggtaactttaagaatctgagagaattcgtgttcaagaacattgactgctattttaaaatctatagcaaacacacccctataaacttggtacgggatttgcctcaaggattctcagcactcgaacccttggtcgatttgccaatcggcatcaatatcacccggtttcagacactcctggctcttcaccgctcctacttgacacctggtgattcctcatctggttggaccgccggcgcagcggcatactatgtcggctatcttcaaccaagaaccttcttgctgaaatataatgagaacggaactataactgatgccgttgattgtgcccttgatccacttagcgaaacaaagtgcactctgaagtccttcacagttgaaaaggggatctaccaaacatccaacttccgggtacaacctactgagtccatagtgcgatttcctaacattaccaatctgtgcccatttggagaagtattcaacgcaactaggttcgcgtccgtttacgcgtggaacaggaaaaggatttccaattgcgtcgccgactatagcgttctctataacagcgcctcatttagcacgtttaagtgttacggggttagtccgaccaaactcaatgacttgtgttttaccaatgtctatgcagactcctttgttattagaggcgacgaggtcagacaaattgcccccggacagacaggtaagattgcagattataattataaactgccggacgacttcacggggtgtgttattgcatggaactccaataacctggactctaaagtaggcgggaactataactatctgtatcgcctgtttcgcaaatctaacctgaaacccttctgcagggacatatgtactgaaatatatcaagctggcagcacaccttgtaatggcgtcgagggattcaattgttacttcccacttcaatcttacggttttcagcctactaacggcgtagggtatcaaccctatagagttgtagtgctctctttcgaattgctccatgcccccgcgactgtttgtggacctaagaagtccacgaacctggtaaagaacaagtgtgttaattttaattttaatggactgaccgggactggagtgctgactgaaagtaacaagaaatttctgcctttccaacaatttggccgcgatatcgctgataccaccgacgccgtcagagatccgcagactctcgaaatcctggacatcacgccctgctcattcggcggggttagcgttattactccaggcactaacactagcaatcaagttgcagttctgtaccaggatgtgaactgtaccgaagtccccgtcgccattcatgccgatcagctgaccccgacttggcgggtatattcaaccggcagcaatgtctttcaaacaagggcgggttgtctcatcggagcggagcatgtaaataatagttatgaatgcgacatccccattggcgcggggatctgtgcttcatatcaaactcaaaccaattccccacggcggagacgatcagtagccagtcaatcaataattgcgtatacgatgagtcttggggcagaaaatagcgtggcttattctaataatagcatcgctatacctacaaattttacaatcagtgtaactaccgaaatccttcctgtcagcatgaccaaaactagcgtagattgcacgatgtatatttgcggagactcaactgagtgcagtaacctgttgttgcaatacggaagtttctgtacccagctgaaccgcgctcttacgggcattgcagtagaacaagataagaatacccaagaagtgtttgcccaggtgaaacaaatctacaagactcccccgattaaagactttggcgggttcaacttcagccagatattgcccgacccgtctcgtcgtagacggtcctttattgaagacctgctcttcaacaaggtcacactggctgatgcaggttttattaagcaatacggcgactgtcttggcgacatcgccgctagggaccttatatgtgctcagaaattcaatggtctgacagttctgccacccttgctcactgacgaaatgatcgctcaatatacaagcgccttgctggctgggactattacttccggatggacattcggggcgggtgccgccttgcaaattccttttgcaatgcaaatggcataccgtttcaacggaatcggcgtaacccagaatgtgctctatgaaaaccagaaattgatagcaaatcaatttaactcagccataggaaagattcaagactctctcagctcaaccgcgagtgctctcggcaagctccaagacgtagtaaatcaaaatgcacaagctttgaacactttggtaaagcaattgtcttccaacttcggggcgatctcatctggccctaacgacatcctgtcccggttgcccaaagtggaagccgaggtgcagatcgaccgcctcatcaccggccgacttcaatcactccaaacctacgtgactcaacaactgatccgggcagccgagataagggcgagtgcaaacttggcagctacgaaaatgtcagaatgtgttctcggccagagtaaacgggtagacttttgtgggaaaggttatcacttgatgtctttccctcaaagcgctcctcacggcgtcgtcttcttgcatgtgacttacgtgccagctcaagaaaagaacttcaccaccgcccctgctatatgccatgacggtaaagctcacttcccccgagagggcgtgttcgttagtaatggaacccattggtttgtgactcaacgaaacttttatgaacctcaaataattaccacggataacacttttgttagtggtaattgtgacgtggtgatcggcattgtgaataacacagtctacgatcctctgcaaccagaactggacagctttaaagaggaacttgacaaatatttcaagaaccatacaagccccgacgtcgacctgggcgacatcagtggaatcaatgcgtccgtagtcaatatccagaaggagattgatcggcttaatgaagtcgctaagaatttgaatgaaagtcttatagatctgcaagaactcgggaagtacgagcaatatattaaatggccttggtccggacgtagaaggcgcaggcggggctcaggcggttcagggtcagggtatattcccgaggcgccacgcgatgggcaagcgtacgtgcgtaaagatggcgaatgggtgttgctttccacattcttggggtgataa

SEQ ID NO: 108 - RNA, 3834 nt, Artificial Sequence
  Description of Artificial Sequence: Synthetic polynucleotide
gccaccauggacuggaccuggauacucuuucucguagcagcagccacacgagugcauucaauguucguuuuccucgugcucuugccuuugguuucuucucagugcguaaaccucacgacucgaacccaacugcccccagcuuauacaaauuccuuuacgcggggcgucuauuacccggauaagguuuucagauccagcgugcugcauaguacacaagaucucuuucuuccuuucuucucaaauguaaccugguuucacgcuauucauguauccggcaccaauggaacuaaaagauuugauaacccgguguugcccuucaaugaugguguguauuucgcuuccacggaaaagucaaacaucaucagaggguggauauucggcacaacauuggauuccaagugccagucacuccucauagugaacaaugcuacuaacgugguuauaaaggucugcgaauuucaauuuuguaaugauccuuuccucgguguuuacuaucacaagaacaauaaguccuggauggaaucagaauuccguguauacaguucugcgaacaauugcacauucgaauaugugucccaacccuuucucauggaucuggaagggaagcaggguaacuuuaagaaucugagagaauucguguucaagaacauugacugcuauuuuaaaaucuauagcaaacacaccccuauaaacuugguacgggauuugccucaaggauucucagcacucgaacccuuggucgauuugccaaucggcaucaauaucacccgguuucagacacuccuggcucuucaccgcuccuacuugacaccuggugauuccucaucugguuggaccgccggcgcagcggcauacuaugucggcuaucuucaaccaagaaccuucuugcugaaauauaaugagaacggaacuauaacugaugccguugauugugcccuugauccacuuagcgaaacaaagugcacucugaaguccuucacaguugaaaaggggaucuaccaaacauccaacuuccggguacaaccuacugaguccauagugcgauuuccuaacauuaccaaucugugcccauuuggagaaguauucaacgcaacuagguucgcguccguuuacgcguggaacaggaaaaggauuuccaauugcgucgccgacuauagcguucucuauaacagcgccucauuuagcacguuuaaguguuacgggguuaguccgaccaaacucaaugacuuguguuuuaccaaugucuaugcagacuccuuuguuauuagaggcgacgaggucagacaaauugcccccggacagacagguaagauugcagauuauaauuauaaacugccggacgacuucacgggguguguuauugcauggaacuccaauaaccuggacucuaaaguaggcgggaacuauaacuaucuguaucgccuguuucgcaaaucuaaccugaaacccuucugcagggacauauguacugaaauauaucaagcuggcagcacaccuuguaauggcgucgagggauucaauuguuacuucccacuucaaucuuacgguuuucagccuacuaacggcguaggguaucaacccuauagaguuguagugcucucuuucgaauugcuccaugcccccgcgacuguuuguggaccuaagaaguccacgaaccugguaaagaacaaguguguuaauuuuaauuuuaauggacugaccgggacuggagugcugacugaaaguaacaagaaauuucugccuuuccaacaauuuggccgcgauaucgcugauaccaccgacgccgucagagauccgcagacucucgaaauccuggacaucacgcccugcucauucggcgggguuagcguuauuacuccaggcacuaacacuagcaaucaaguugcaguucuguaccaggaugugaacuguaccgaaguccccgucgccauucaugccgaucagcugaccccgacuuggcggguauauucaaccggcagcaaugucuuucaaacaagggcggguugucucaucggagcggagcauguaaauaauaguuaugaaugcgacauccccauuggcgcggggaucugugcuucauaucaaacucaaaccaauuccccacggcggagacgaucaguagccagucaaucaauaauugcguauacgaugagucuuggggcagaaaauagcguggcuuauucuaauaauagcaucgcuauaccuacaaauuuuacaaucaguguaacuaccgaaauccuuccugucagcaugaccaaaacuagcguagauugcacgauguauauuugcggagacucaacugagugcaguaaccuguuguugcaauacggaaguuucuguacccagcugaaccgcgcucuuacgggcauugcaguagaacaagauaagaauacccaagaaguguuugcccaggugaaacaaaucuacaagacucccccgauuaaagacuuuggcggguucaacuucagccagauauugcccgacccgucucgucguagacgguccuuuauugaagaccugcucuucaacaaggucacacuggcugaugcagguuuuauuaagcaauacggcgacugucuuggcgacaucgccgcuagggaccuuauaugugcucagaaauucaauggucugacaguucugccacccuugcucacugacgaaaugaucgcucaauauacaagcgccuugcuggcugggacuauuacuuccggauggacauucggggcgggugccgccuugcaaauuccuuuugcaaugcaaauggcauaccguuucaacggaaucggcguaacccagaaugugcucuaugaaaaccagaaauugauagcaaaucaauuuaacucagccauaggaaagauucaagacucucucagcucaaccgcgagugcucucggcaagcuccaagacguaguaaaucaaaaugcacaagcuuugaacacuuugguaaagcaauugucuuccaacuucggggcgaucucaucuggcccuaacgacauccugucccgguugcccaaaguggaagccgaggugcagaucgaccgccucaucaccggccgacuucaaucacuccaaaccuacgugacucaacaacugauccgggcagccgagauaagggcgagugcaaacuuggcagcuacgaaaaugucagaauguguucucggccagaguaaacggguagacuuuugugggaaagguuaucacuugaugucuuucccucaaagcgcuccucacggcgucgucuucuugcaugugacuuacgugccagcucaagaaaagaacuucaccaccgccccugcuauaugccaugacgguaaagcucacuucccccgagagggcguguucguuaguaauggaacccauugguuugugacucaacgaaacuuuuaugaaccucaaauaauuaccacggauaacacuuuuguuagugguaauugugacguggugaucggcauugugaauaacacagucuacgauccucugcaaccagaacuggacagcuuuaaagaggaacuugacaaauauuucaagaaccauacaagccccgacgucgaccugggcgacaucaguggaaucaaugcguccguagucaauauccagaaggagauugaucggcuuaaugaagucgcuaagaauuugaaugaaagucuuauagaucugcaagaacucgggaaguacgagcaauauauuaaauggccuugguccggacguagaaggcgcaggcggggcucaggcgguucagggucaggguauauucccgaggcgccacgcgaugggcaagcguacgugcguaaagauggcgaauggguguugcuuuccacauucuuggggugauaa

SEQ ID NO: 109 - protein, 1274 aa, Artificial Sequence
  Description of Artificial Sequence: Synthetic polypeptide
MDWTWILFLVAAATRVHSMFVFLVLLPLVSSQCVNLTTRTQLPPAYTNSFTRGVYYPDKVFRSSVLHSTQDLFLPFFSNVTWFHAIHVSGTNGTKRFDNPVLPFNDGVYFASTEKSNIIRGWIFGTTLDSKCQSLLIVNNATNVVIKVCEFQFCNDPFLGVYYHKNNKSWMESEFRVYSSANNCTFEYVSQPFLMDLEGKQGNFKNLREFVFKNIDCYFKIYSKHTPINLVRDLPQGFSALEPLVDLPIGINITRFQTLLALHRSYLTPGDSSSGWTAGAAAYYVGYLQPRTFLLKYNENGTITDAVDCALDPLSETKCTLKSFTVEKGIYQTSNFRVQPTESIVRFPNITNLCPFGEVFNATRFASVYAWNRKRISNCVADYSVLYNSASFSTFKCYGVSPTKLNDLCFTNVYADSFVIRGDEVRQIAPGQTGKIADYNYKLPDDFTGCVIAWNSNNLDSKVGGNYNYLYRLFRKSNLKPFCRDICTEIYQAGSTPCNGVEGFNCYFPLQSYGFQPTNGVGYQPYRVVVLSFELLHAPATVCGPKKSTNLVKNKCVNFNFNGLTGTGVLTESNKKFLPFQQFGRDIADTTDAVRDPQTLEILDITPCSFGGVSVITPGTNTSNQVAVLYQDVNCTEVPVAIHADQLTPTWRVYSTGSNVFQTRAGCLIGAEHVNNSYECDIPIGAGICASYQTQTNSPRRRRSVASQSIIAYTMSLGAENSVAYSNNSIAIPTNFTISVTTEILPVSMTKTSVDCTMYICGDSTECSNLLLQYGSFCTQLNRALTGIAVEQDKNTQEVFAQVKQIYKTPPIKDFGGFNFSQILPDPSRRRRSFIEDLLFNKVTLADAGFIKQYGDCLGDIAARDLICAQKFNGLTVLPPLLTDEMIAQYTSALLAGTITSGWTFGAGAALQIPFAMQMAYRFNGIGVTQNVLYENQKLIANQFNSAIGKIQDSLSSTASALGKLQDVVNQNAQALNTLVKQLSSNFGAISSGPNDILSRLPKVEAEVQIDRLITGRLQSLQTYVTQQLIRAAEIRASANLAATKMSECVLGQSKRVDFCGKGYHLMSFPQSAPHGVVFLHVTYVPAQEKNFTTAPAICHDGKAHFPREGVFVSNGTHWFVTQRNFYEPQIITTDNTFVSGNCDVVIGIVNNTVYDPLQPELDSFKEELDKYFKNHTSPDVDLGDISGINASVVNIQKEIDRLNEVAKNLNESLIDLQELGKYEQYIKWPWSGRRRRRRGSGGSGSGYIPEAPRDGQAYVRKDGEWVLLSTFLG

SEQ ID NO: 110 - DNA, 3816 bp, Artificial Sequence
  Description of Artificial Sequence: Synthetic polynucleotide
gccaccatggactggacctggatactctttctcgtagcagcagccacacgagtgcattcaatgttcgtgttcctcgtgctcctgcctctcgttagcagccaatgtgttaatctcaccaccagaacacagctcccacccgcgtatactaactcttttacgaggggagtttattatcccgataaggttttccggtctagcgtactccactccacccaagatctgttcctgcctttctttagcaacgtgacgtggtttcatgcaatccacgtgagtggcaccaatggaaccaagcggttcgataatcctgtgttgccgtttaacgatggcgtgtattttgcctcaactgaaaagtctaacataatacgcggctggatcttcgggaccacattggatagtaagtgtcaatctctgcttatcgtgaacaacgctactaacgtcgttataaaggtctgtgagttccaattctgcaacgacccattcctgggtgtgtattaccacaagaataataaatcttggatggagtctgagtttcgcgtatactcttctgctaacaactgcacctttgaatatgtaagtcaaccattcctcatggatctggaaggaaaacaaggcaactttaagaacttgcgggaatttgtcttcaagaacatcgactgttattttaaaatttactcaaaacacaccccgattaatctggtccgcgatttgccccaagggttctctgcattggaaccccttgtggacttgcctataggaattaatatcacccgctttcaaactcttctggcgctgcaccgtagctacctgacaccaggagatagctctagtggctggactgctggagccgcggcatattatgtggggtatctgcagccacgtacatttctcctcaaatataatgaaaatggtacaataacggatgcagtcgactgcgcattggaccctctgagtgaaacaaaatgcactctcaagagcttcactgttgaaaagggcatataccaaacatctaattttagagtccaacccactgaatccattgtccgatttcctaatattacaaacctctgcccatttggagaagtgttcaacgccactaggtttgcatccgtgtacgcatggaacagaaaacgaatttctaattgtgtggcagactatagcgtgctgtataactcagcaagctttagcacatttaagtgttatggagttagcccaaccaaattgaatgatctttgtttcacgaacgtgtacgccgatagcttcgttattcgaggggacgaggtgaggcaaatcgctccaggtcaaaccggtaaaatcgccgattacaattataaacttcctgatgacttcactggctgtgtcatagcatggaactctaataatctcgacagcaaggtcggtgggaactataactatctttatcgactctttagaaagagtaatctcaaaccattttgcagagacatttgtacagagatttatcaggcagggagcacaccatgtaatggggtcgagggcttcaactgttacttccccctgcaatcttatgggttccagccgaccaatggagtgggctaccaaccttatcgcgtggtggtcctgtcttttgaactgcttcatgctccagccaccgtatgcggccctaagaagtctacaaatttggtcaagaacaagtgcgtcaattttaacttcaatggtctgactggaaccggtgtcctcacagaatctaacaagaaatttctgccatttcaacaatttggaagagatatcgcggatactacggatgctgttagggacccccaaacacttgaaattctcgacattacaccctgttcctttggcggggtcagtgtcattaccccgggtacaaatactagtaaccaagtcgcagtactgtatcaagatgttaattgtaccgaagtgccggtagcaatacacgctgatcaacttacaccaacatggcgagtgtattctacggggagtaatgtcttccaaacgcgggccgggtgtctgattggcgcggaacacgtaaacaactcctacgaatgtgatattccaataggcgcaggcatatgtgcgagctatcaaacacaaactaactcccctagacggcgtcggagtgtggctagtcaatcaatcattgcctatacaatgtctctgggagcagaaaacagcgtggcatattccaataattccatcgctatacctaccaactttaccatcagcgtcactactgagattcttcccgtctccatgacgaaaacttccgttgattgtactatgtacatctgcggagacagcaccgaatgcagtaaccttctcttgcaatatggcagcttttgtactcagctcaacagagctctcacaggtattgccgtcgaacaagataagaacacccaagaggtgttcgcccaggtgaaacagatatataagaccccacccatcaaggatttcggcgggtttaattttagtcaaatcctgcccgatccctcacggcgtcgcaggtcctttattgaagatcttctgttcaataaggtcacactcgctgacgcaggctttatcaagcagtatggagattgtctgggcgatatagctgcgagggacttgatctgcgcacaaaagttcaacggccttacagtgctgcccccgttgctgacagatgagatgattgcgcaatacacttccgcgcttctcgcagggaccatcacgagcggctggacgttcggcgctggcgccgctctgcaaatcccgtttgcaatgcaaatggcctataggtttaatggtatcggtgtaacgcaaaacgtactttatgaaaaccagaaactgatcgctaaccaattcaattccgctattggcaaaattcaagacagcctcagcagcacggctagtgcactgggtaaactccaagacgtggtgaaccaaaatgcccaagcattgaatacacttgtcaagcaacttagttccaacttcggtgcaatttcaagtggtccaaatgacatacttagcaggctgcctaaagtagaagccgaagtgcaaatcgatagacttatcaccggccgcctgcaatcccttcaaacatacgtgactcagcagcttatcagggctgctgagattcgagcaagtgcgaacctggccgccaccaaaatgagtgagtgcgtccttgggcaatccaagcgcgttgacttttgtggtaaggggtatcatctcatgagcttcccccaatccgcccctcacggagtagtgtttctccatgtgacgtatgttcctgcacaagagaagaacttcacaacggctccggctatatgtcatgacggaaaagcgcactttcctcgcgaaggagtgtttgtgtcaaatggaacgcactggttcgtgacgcaaaggaatttctacgagcctcaaatcatcactacagataatacttttgtctctgggaattgcgacgtggtcattggaatcgtcaacaatacggtttacgatcccctgcaaccagaactggattcattcaaagaagaactcgacaagtacttcaagaatcataccagtcctgatgtggatctgggcgatatcagtgggatcaatgcaagcgttgtcaacattcaaaaggaaatagaccgcctcaacgaagtcgcaaagaatctcaatgaaagccttattgatcttcaagagctcggaaaatatgagcaatatattaagtggccttggtccggcggctcaggcggaagtggctcaggatatattcctgaggctccccgagatggacaagcatacgtgagaaaagatggggagtgggtgttgctgagtacgttccttggatgataa

SEQ ID NO: 111 - RNA, 3816 nt, Artificial Sequence
  Description of Artificial Sequence: Synthetic polynucleotide
gccaccauggacuggaccuggauacucuuucucguagcagcagccacacgagugcauucaauguucguguuccucgugcuccugccucucguuagcagccaauguguuaaucucaccaccagaacacagcucccacccgcguauacuaacucuuuuacgaggggaguuuauuaucccgauaagguuuuccggucuagcguacuccacuccacccaagaucuguuccugccuuucuuuagcaacgugacgugguuucaugcaauccacgugaguggcaccaauggaaccaagcgguucgauaauccuguguugccguuuaacgauggcguguauuuugccucaacugaaaagucuaacauaauacgcggcuggaucuucgggaccacauuggauaguaagugucaaucucugcuuaucgugaacaacgcuacuaacgucguuauaaaggucugugaguuccaauucugcaacgacccauuccuggguguguauuaccacaagaauaauaaaucuuggauggagucugaguuucgcguauacucuucugcuaacaacugcaccuuugaauauguaagucaaccauuccucauggaucuggaaggaaaacaaggcaacuuuaagaacuugcgggaauuugucuucaagaacaucgacuguuauuuuaaaauuuacucaaaacacaccccgauuaaucugguccgcgauuugccccaaggguucucugcauuggaaccccuuguggacuugccuauaggaauuaauaucacccgcuuucaaacucuucuggcgcugcaccguagcuaccugacaccaggagauagcucuaguggcuggacugcuggagccgcggcauauuaugugggguaucugcagccacguacauuucuccucaaauauaaugaaaaugguacaauaacggaugcagucgacugcgcauuggacccucugagugaaacaaaaugcacucucaagagcuucacuguugaaaagggcauauaccaaacaucuaauuuuagaguccaacccacugaauccauuguccgauuuccuaauauuacaaaccucugcccauuuggagaaguguucaacgccacuagguuugcauccguguacgcauggaacagaaaacgaauuucuaauuguguggcagacuauagcgugcuguauaacucagcaagcuuuagcacauuuaaguguuauggaguuagcccaaccaaauugaaugaucuuuguuucacgaacguguacgccgauagcuucguuauucgaggggacgaggugaggcaaaucgcuccaggucaaaccgguaaaaucgccgauuacaauuauaaacuuccugaugacuucacuggcugugucauagcauggaacucuaauaaucucgacagcaaggucggugggaacuauaacuaucuuuaucgacucuuuagaaagaguaaucucaaaccauuuugcagagacauuuguacagagauuuaucaggcagggagcacaccauguaauggggucgagggcuucaacuguuacuucccccugcaaucuuauggguuccagccgaccaauggagugggcuaccaaccuuaucgcguggugguccugucuuuugaacugcuucaugcuccagccaccguaugcggcccuaagaagucuacaaauuuggucaagaacaagugcgucaauuuuaacuucaauggucugacuggaaccgguguccucacagaaucuaacaagaaauuucugccauuucaacaauuuggaagagauaucgcggauacuacggaugcuguuagggacccccaaacacuugaaauucucgacauuacacccuguuccuuuggcggggucagugucauuaccccggguacaaauacuaguaaccaagucgcaguacuguaucaagauguuaauuguaccgaagugccgguagcaauacacgcugaucaacuuacaccaacauggcgaguguauucuacggggaguaaugucuuccaaacgcgggccgggugucugauuggcgcggaacacguaaacaacuccuacgaaugugauauuccaauaggcgcaggcauaugugcgagcuaucaaacacaaacuaacuccccuagacggcgucggaguguggcuagucaaucaaucauugccuauacaaugucucugggagcagaaaacagcguggcauauuccaauaauuccaucgcuauaccuaccaacuuuaccaucagcgucacuacugagauucuucccgucuccaugacgaaaacuuccguugauuguacuauguacaucugcggagacagcaccgaaugcaguaaccuucucuugcaauauggcagcuuuuguacucagcucaacagagcucucacagguauugccgucgaacaagauaagaacacccaagagguguucgcccaggugaaacagauauauaagaccccacccaucaaggauuucggcggguuuaauuuuagucaaauccugcccgaucccucacggcgucgcagguccuuuauugaagaucuucuguucaauaaggucacacucgcugacgcaggcuuuaucaagcaguauggagauugucugggcgauauagcugcgagggacuugaucugcgcacaaaaguucaacggccuuacagugcugcccccguugcugacagaugagaugauugcgcaauacacuuccgcgcuucucgcagggaccaucacgagcggcuggacguucggcgcuggcgccgcucugcaaaucccguuugcaaugcaaauggccuauagguuuaaugguaucgguguaacgcaaaacguacuuuaugaaaaccagaaacugaucgcuaaccaauucaauuccgcuauuggcaaaauucaagacagccucagcagcacggcuagugcacuggguaaacuccaagacguggugaaccaaaaugcccaagcauugaauacacuugucaagcaacuuaguuccaacuucggugcaauuucaagugguccaaaugacauacuuagcaggcugccuaaaguagaagccgaagugcaaaucgauagacuuaucaccggccgccugcaaucccuucaaacauacgugacucagcagcuuaucagggcugcugagauucgagcaagugcgaaccuggccgccaccaaaaugagugagugcguccuugggcaauccaagcgcguugacuuuugugguaagggguaucaucucaugagcuucccccaauccgccccucacggaguaguguuucuccaugugacguauguuccugcacaagagaagaacuucacaacggcuccggcuauaugucaugacggaaaagcgcacuuuccucgcgaaggaguguuugugucaaauggaacgcacugguucgugacgcaaaggaauuucuacgagccucaaaucaucacuacagauaauacuuuugucucugggaauugcgacguggucauuggaaucgucaacaauacgguuuacgauccccugcaaccagaacuggauucauucaaagaagaacucgacaaguacuucaagaaucauaccaguccugauguggaucugggcgauaucagugggaucaaugcaagcguugucaacauucaaaaggaaauagaccgccucaacgaagucgcaaagaaucucaaugaaagccuuauugaucuucaagagcucggaaaauaugagcaauauauuaaguggccuugguccggcggcucaggcggaaguggcucaggauauauuccugaggcuccccgagauggacaagcauacgugagaaaagauggggaguggguguugcugaguacguuccuuggaugauaa

SEQ ID NO: 112 - protein, 1268 aa, Artificial Sequence
  Description of Artificial Sequence: Synthetic polypeptide
MDWTWILFLVAAATRVHSMFVFLVLLPLVSSQCVNLTTRTQLPPAYTNSFTRGVYYPDKVFRSSVLHSTQDLFLPFFSNVTWFHAIHVSGTNGTKRFDNPVLPFNDGVYFASTEKSNIIRGWIFGTTLDSKCQSLLIVNNATNVVIKVCEFQFCNDPFLGVYYHKNNKSWMESEFRVYSSANNCTFEYVSQPFLMDLEGKQGNFKNLREFVFKNIDCYFKIYSKHTPINLVRDLPQGFSALEPLVDLPIGINITRFQTLLALHRSYLTPGDSSSGWTAGAAAYYVGYLQPRTFLLKYNENGTITDAVDCALDPLSETKCTLKSFTVEKGIYQTSNFRVQPTESIVRFPNITNLCPFGEVFNATRFASVYAWNRKRISNCVADYSVLYNSASFSTFKCYGVSPTKLNDLCFTNVYADSFVIRGDEVRQIAPGQTGKIADYNYKLPDDFTGCVIAWNSNNLDSKVGGNYNYLYRLFRKSNLKPFCRDICTEIYQAGSTPCNGVEGFNCYFPLQSYGFQPTNGVGYQPYRVVVLSFELLHAPATVCGPKKSTNLVKNKCVNFNFNGLTGTGVLTESNKKFLPFQQFGRDIADTTDAVRDPQTLEILDITPCSFGGVSVITPGTNTSNQVAVLYQDVNCTEVPVAIHADQLTPTWRVYSTGSNVFQTRAGCLIGAEHVNNSYECDIPIGAGICASYQTQTNSPRRRRSVASQSIIAYTMSLGAENSVAYSNNSIAIPTNFTISVTTEILPVSMTKTSVDCTMYICGDSTECSNLLLQYGSFCTQLNRALTGIAVEQDKNTQEVFAQVKQIYKTPPIKDFGGFNFSQILPDPSRRRRSFIEDLLFNKVTLADAGFIKQYGDCLGDIAARDLICAQKFNGLTVLPPLLTDEMIAQYTSALLAGTITSGWTFGAGAALQIPFAMQMAYRFNGIGVTQNVLYENQKLIANQFNSAIGKIQDSLSSTASALGKLQDVVNQNAQALNTLVKQLSSNFGAISSGPNDILSRLPKVEAEVQIDRLITGRLQSLQTYVTQQLIRAAEIRASANLAATKMSECVLGQSKRVDFCGKGYHLMSFPQSAPHGVVFLHVTYVPAQEKNFTTAPAICHDGKAHFPREGVFVSNGTHWFVTQRNFYEPQIITTDNTFVSGNCDVVIGIVNNTVYDPLQPELDSFKEELDKYFKNHTSPDVDLGDISGINASVVNIQKEIDRLNEVAKNLNESLIDLQELGKYEQYIKWPWSGGSGGSGSGYIPEAPRDGQAYVRKDGEWVLLSTFLG

SEQ ID NO: 113 - DNA, 3774 bp, Artificial Sequence
  Description of Artificial Sequence: Synthetic polynucleotide
gccaccatggactggacctggatactctttctcgtagcagcagccacacgagtgcattcaatgttcgtgttcttggtgctgctgcctcttgtctcatcacagtgcgttaatctgaccacccgtacacaactcccacccgcatacacaaatagctttacacgcggagtgtattaccccgataaagtctttcggagctcagtgctccattctactcaagatcttttcctgccgttctttagtaacgttacttggtttcatgcaatacatgtgtctggcacaaacggaaccaaacgttttgataatccggtgttgccatttaatgatggtgtatattttgcttccacggaaaagtcaaacatcatccgtgggtggatctttggcaccactcttgatagcaaatgtcaaagccttctgattgttaataacgctacaaacgtcgtaattaaagtgtgtgaattccagttctgtaatgaccccttcctcggagtatattaccacaagaataacaaatcttggatggagagcgaatttagagtttacagttcagccaataactgtacatttgaatatgtcagtcagcctttcctcatggacctcgaaggtaaacaaggtaattttaagaacttgagagagttcgtgtttaagaacatcgatggctatttcaaaatttactctaagcacacaccaatcaacctggttcgagacctgccccagggtttctcagctttggaaccattggtggacctgccaatcggcattaacattaccagatttcaaactttgttggcactccaccggtcatatcttacccccggagacagttcctcaggctggacggcaggcgccgccgcgtactatgttgggtatctccaaccccgaaccttccttctcaaatacaatgaaaacgggacgattacagatgcagtcgattgcgccctggaccccttgtccgaaactaaatgcactctgaagagtttcacggtagagaagggaatctatcaaacgagcaattttcgagtccaaccaacggaatctattgtgcggtttcccaatatcacaaacctctgtccattcggagaagtctttaatgctaccaggtttgcgtctgtatatgcatggaaccgaaagaggatttccaattgcgtagcggactacagtgtcctttataacagcgcttcattttccacgtttaagtgttatggtgtttctccaacgaaactcaacgacctctgttttactaacgtttacgctgacagctttgttatacgtggggacgaagtcaggcaaattgctcctggacagactggaaagatcgctgattataattataaacttcctgacgatttcaccggctgcgttattgcatggaactccaacaatctggattcaaaagtgggtggaaattataattatctgtataggttgtttcggaagagcaatcttaagccctttgagcgggacatatgtaccgaaatttaccaagcaggctccaccccatgcaatggagtagaagggttcaattgctattttcctctgcaaagttatggctttcaacccaccaacggagttgggtatcaaccttacagggttgtcgtgctgagtttcgaattgctccacgcacccgctacagtatgtggccccaagaagtccactaatcttgttaagaataaatgcgtgaacttcaacttcaatggacttacaggtactggagtactcacggaatcaaacaagaaatttctcccatttcaacagtttggccgagatatagctgacaccacagatgctgttcgcgacccccagacgttggaaatacttgatatcactccctgcagcttcggcggcgtgagcgtgatcactccaggtactaatacgagcaatcaagttgccgttctgtaccaagatgtgaactgcaccgaggttccagtggcaattcacgccgaccaacttactcccacctggcgggtctattccaccggatcaaacgtcttccaaactcgcgctggttgccttatcggtgcagagcacgttaataattcctatgaatgtgacattcccataggagcaggcatctgtgcatcttatcaaacccagactaattcccctggttccgcttcctctgttgcatcccagtccataattgcctacactatgagtctcggggctgaaaattccgtggcctattctaataattcaatcgccatcccaaccaattttaccatatccgtaacgactgaaatacttcctgtcagtatgaccaagacctcagtggactgcaccatgtacatctgcggcgattctactgaatgttccaatctgcttttgcaatatggttcattctgcacccaactcaacagggctcttacagggatcgccgtcgaacaggataagaatacccaggaagtgttcgcccaagttaagcaaatttacaagacaccacccatcaaggacttcggcgggttcaacttcagccaaattctgcccgacccgtctaagccttctaagcgctctttcattgaggatcttttgttcaataaggttacgcttgccgatgcagggtttatcaaacagtatggcgactgtcttggggatatcgcagctagggatcttatttgtgcacagaaatttaatggcctgactgttcttccccctttgctcactgacgagatgattgcccagtacacttcagctctcctggccgggactataacttctggttggaccttcggagctggcgccgccctgcaaattccatttgcaatgcagatggcttatcgcttcaacggaattggggtgacccaaaatgttctctacgagaaccagaaactcattgcaaaccagttcaattctgcgatcgggaagatccaggattccctgtctagtacggctagtgccctcggtaagctccaagacgtcgtcaaccaaaacgcccaggccttgaacacccttgtcaaacaactgagctccaattttggggctattagcagtgtgctgaatgatatcctgtcccgccttgacccaccggaagcggaagtccaaattgatcgactgatcactgggcgtctccaatcccttcaaacttacgtgacccaacaactcatccgagcagctgagattagggctagcgctaaccttgctgctactaagatgtcagagtgtgtcctcggccagtctaagagagtggacttttgtgggaaagggtaccacttgatgtcattcccacaaagcgccccacacggcgtggtgtttctccacgtcacttacgttccagctcaggaaaagaactttaccaccgcccccgctatatgtcatgatgggaaggcccactttcctcgtgaaggtgtctttgtcagcaatggcacacactggtttgtgacccaacggaatttctatgagcctcagattattaccacggataacactttcgtatcagggaattgtgatgtggttatcggcatcgttaataatacagtgtatgacccactgcagccagagcttgacagcttcaaagaagagctcgataagtactttaagaatcatacaagtcctgacgttgatcttggggatattagtgggattaacgccagcgtcgtcaatattcagaaagagattgacaggttgaacgaagtagctaagaatcttaatgaaagcctgatagatttgcaagaacttggtaagtatgagcaggggtacatacccgaggctcctcgggatgggcaggcctatgtacgcaaagacggtgaatgggtattgctcagcacttttctcggctgataa

SEQ ID NO: 114 - RNA, 3774 nt, Artificial Sequence
  Description of Artificial Sequence: Synthetic polynucleotide
gccaccauggacuggaccuggauacucuuucucguagcagcagccacacgagugcauucaauguucguguucuuggugcugcugccucuugucucaucacagugcguuaaucugaccacccguacacaacucccacccgcauacacaaauagcuuuacacgcggaguguauuaccccgauaaagucuuucggagcucagugcuccauucuacucaagaucuuuuccugccguucuuuaguaacguuacuugguuucaugcaauacaugugucuggcacaaacggaaccaaacguuuugauaauccgguguugccauuuaaugaugguguauauuuugcuuccacggaaaagucaaacaucauccguggguggaucuuuggcaccacucuugauagcaaaugucaaagccuucugauuguuaauaacgcuacaaacgucguaauuaaagugugugaauuccaguucuguaaugaccccuuccucggaguauauuaccacaagaauaacaaaucuuggauggagagcgaauuuagaguuuacaguucagccaauaacuguacauuugaauaugucagucagccuuuccucauggaccucgaagguaaacaagguaauuuuaagaacuugagagaguucguguuuaagaacaucgauggcuauuucaaaauuuacucuaagcacacaccaaucaaccugguucgagaccugccccaggguuucucagcuuuggaaccauugguggaccugccaaucggcauuaacauuaccagauuucaaacuuuguuggcacuccaccggucauaucuuacccccggagacaguuccucaggcuggacggcaggcgccgccgcguacuauguuggguaucuccaaccccgaaccuuccuucucaaauacaaugaaaacgggacgauuacagaugcagucgauugcgcccuggaccccuuguccgaaacuaaaugcacucugaagaguuucacgguagagaagggaaucuaucaaacgagcaauuuucgaguccaaccaacggaaucuauugugcgguuucccaauaucacaaaccucuguccauucggagaagucuuuaaugcuaccagguuugcgucuguauaugcauggaaccgaaagaggauuuccaauugcguagcggacuacaguguccuuuauaacagcgcuucauuuuccacguuuaaguguuaugguguuucuccaacgaaacucaacgaccucuguuuuacuaacguuuacgcugacagcuuuguuauacguggggacgaagucaggcaaauugcuccuggacagacuggaaagaucgcugauuauaauuauaaacuuccugacgauuucaccggcugcguuauugcauggaacuccaacaaucuggauucaaaaguggguggaaauuauaauuaucuguauagguuguuucggaagagcaaucuuaagcccuuugagcgggacauauguaccgaaauuuaccaagcaggcuccaccccaugcaauggaguagaaggguucaauugcuauuuuccucugcaaaguuauggcuuucaacccaccaacggaguuggguaucaaccuuacaggguugucgugcugaguuucgaauugcuccacgcacccgcuacaguauguggccccaagaaguccacuaaucuuguuaagaauaaaugcgugaacuucaacuucaauggacuuacagguacuggaguacucacggaaucaaacaagaaauuucucccauuucaacaguuuggccgagauauagcugacaccacagaugcuguucgcgacccccagacguuggaaauacuugauaucacucccugcagcuucggcggcgugagcgugaucacuccagguacuaauacgagcaaucaaguugccguucuguaccaagaugugaacugcaccgagguuccaguggcaauucacgccgaccaacuuacucccaccuggcgggucuauuccaccggaucaaacgucuuccaaacucgcgcugguugccuuaucggugcagagcacguuaauaauuccuaugaaugugacauucccauaggagcaggcaucugugcaucuuaucaaacccagacuaauuccccugguuccgcuuccucuguugcaucccaguccauaauugccuacacuaugagucucggggcugaaaauuccguggccuauucuaauaauucaaucgccaucccaaccaauuuuaccauauccguaacgacugaaauacuuccugucaguaugaccaagaccucaguggacugcaccauguacaucugcggcgauucuacugaauguuccaaucugcuuuugcaauaugguucauucugcacccaacucaacagggcucuuacagggaucgccgucgaacaggauaagaauacccaggaaguguucgcccaaguuaagcaaauuuacaagacaccacccaucaaggacuucggcggguucaacuucagccaaauucugcccgacccgucuaagccuucuaagcgcucuuucauugaggaucuuuuguucaauaagguuacgcuugccgaugcaggguuuaucaaacaguauggcgacugucuuggggauaucgcagcuagggaucuuauuugugcacagaaauuuaauggccugacuguucuucccccuuugcucacugacgagaugauugcccaguacacuucagcucuccuggccgggacuauaacuucugguuggaccuucggagcuggcgccgcccugcaaauuccauuugcaaugcagauggcuuaucgcuucaacggaauuggggugacccaaaauguucucuacgagaaccagaaacucauugcaaaccaguucaauucugcgaucgggaagauccaggauucccugucuaguacggcuagugcccucgguaagcuccaagacgucgucaaccaaaacgcccaggccuugaacacccuugucaaacaacugagcuccaauuuuggggcuauuagcagugugcugaaugauauccugucccgccuugacccaccggaagcggaaguccaaauugaucgacugaucacugggcgucuccaaucccuucaaacuuacgugacccaacaacucauccgagcagcugagauuagggcuagcgcuaaccuugcugcuacuaagaugucagaguguguccucggccagucuaagagaguggacuuuugugggaaaggguaccacuugaugucauucccacaaagcgccccacacggcgugguguuucuccacgucacuuacguuccagcucaggaaaagaacuuuaccaccgcccccgcuauaugucaugaugggaaggcccacuuuccucgugaaggugucuuugucagcaauggcacacacugguuugugacccaacggaauuucuaugagccucagauuauuaccacggauaacacuuucguaucagggaauugugaugugguuaucggcaucguuaauaauacaguguaugacccacugcagccagagcuugacagcuucaaagaagagcucgauaaguacuuuaagaaucauacaaguccugacguugaucuuggggauauuagugggauuaacgccagcgucgucaauauucagaaagagauugacagguugaacgaaguagcuaagaaucuuaaugaaagccugauagauuugcaagaacuugguaaguaugagcagggguacauacccgaggcuccucgggaugggcaggccuauguacgcaaagacggugaauggguauugcucagcacuuuucucggcugauaa

SEQ ID NO: 115 - protein, 1254 aa, Artificial Sequence
  Description of Artificial Sequence: Synthetic polypeptide
MDWTWILFLVAAATRVHSMFVFLVLLPLVSSQCVNLTTRTQLPPAYTNSFTRGVYYPDKVFRSSVLHSTQDLFLPFFSNVTWFHAIHVSGTNGTKRFDNPVLPFNDGVYFASTEKSNIIRGWIFGTTLDSKCQSLLIVNNATNVVIKVCEFQFCNDPFLGVYYHKNNKSWMESEFRVYSSANNCTFEYVSQPFLMDLEGKQGNFKNLREFVFKNIDGYFKIYSKHTPINLVRDLPQGFSALEPLVDLPIGINITRFQTLLALHRSYLTPGDSSSGWTAGAAAYYVGYLQPRTFLLKYNENGTITDAVDCALDPLSETKCTLKSFTVEKGIYQTSNFRVQPTESIVRFPNITNLCPFGEVFNATRFASVYAWNRKRISNCVADYSVLYNSASFSTFKCYGVSPTKLNDLCFTNVYADSFVIRGDEVRQIAPGQTGKIADYNYKLPDDFTGCVIAWNSNNLDSKVGGNYNYLYRLFRKSNLKPFERDICTEIYQAGSTPCNGVEGFNCYFPLQSYGFQPTNGVGYQPYRVVVLSFELLHAPATVCGPKKSTNLVKNKCVNFNFNGLTGTGVLTESNKKFLPFQQFGRDIADTTDAVRDPQTLEILDITPCSFGGVSVITPGTNTSNQVAVLYQDVNCTEVPVAIHADQLTPTWRVYSTGSNVFQTRAGCLIGAEHVNNSYECDIPIGAGICASYQTQTNSPGSASSVASQSIIAYTMSLGAENSVAYSNNSIAIPTNFTISVTTEILPVSMTKTSVDCTMYICGDSTECSNLLLQYGSFCTQLNRALTGIAVEQDKNTQEVFAQVKQIYKTPPIKDFGGFNFSQILPDPSKPSKRSFIEDLLFNKVTLADAGFIKQYGDCLGDIAARDLICAQKFNGLTVLPPLLTDEMIAQYTSALLAGTITSGWTFGAGAALQIPFAMQMAYRFNGIGVTQNVLYENQKLIANQFNSAIGKIQDSLSSTASALGKLQDVVNQNAQALNTLVKQLSSNFGAISSVLNDILSRLDPPEAEVQIDRLITGRLQSLQTYVTQQLIRAAEIRASANLAATKMSECVLGQSKRVDFCGKGYHLMSFPQSAPHGVVFLHVTYVPAQEKNFTTAPAICHDGKAHFPREGVFVSNGTHWFVTQRNFYEPQIITTDNTFVSGNCDVVIGIVNNTVYDPLQPELDSFKEELDKYFKNHTSPDVDLGDISGINASVVNIQKEIDRLNEVAKNLNESLIDLQELGKYEQGYIPEAPRDGQAYVRKDGEWVLLSTFLG

SEQ ID NO: 116 - DNA, 3774 bp, Artificial Sequence
  Description of Artificial Sequence: Synthetic polynucleotide
gccaccatggactggacctggatactctttctcgtagcagcagccacacgagtgcattcaatgtttgttttccttgttctgctcccgcttgtgtcttcccagtgcgtgaacctgaccacccgaactcaactcccaccagcatacaccaactcatttacaagaggagtttattacccggacaaggtatttcgaagttcagttcttcacagcacccaagacctgtttctgccattcttcagtaatgtcacttggtttcacgcgatacatgtcagcggtacaaacgggacaaagcgattcgataacccagtactcccattcaacgacggagtgtattttgcatctacagagaaatccaacattatacgcgggtggatctttggaactactctggactccaagacacagagcctgctcattgtgaacaatgcaacgaatgtcgtcataaaagtctgtgaatttcaattttgcaacgatcctttcctcggagtctattaccataagaacaataagagttggatggagagtgagtttcgcgtctattcttccgcgaacaattgtacatttgaatatgtatcacaaccctttcttatggatttggaaggcaaacaaggtaacttcaagaacttgcgcgagttcgtgttcaagaacatagactgttattttaagatctatagtaagcatacgccaatcaatctggtgcgagatttgcctcagggcttttctgctcttgaacccttggttgatctgcccatcgggatcaacataaccagatttcaaacgttgctcgcactccaccgcagctatctcactcctggcgattcctcatctgggtggaccgccggagctgctgcttattacgtcggctatctccagccgcgtactttcctgctcaagtataatgagaatggcaccattaccgatgctgtggattgtgctcttgatccactctctgaaaccaaatgcactctcaagtcttttaccgtggaaaagggtatttatcagacatctaattttcgggtgcaacctactgagtcaattgtacggtttcctaacataactaacctttgtccatttggggaagtcttcaatgccacgcggttcgcatcagtctatgcatggaacagaaaacgtatctccaactgcgtcgccgattattccgtcctttacaatagcgctagcttttccacattcaaatgttatggcgtatcaccaaccaaacttaacgatctctgctttactaatgtctacgctgactctttcgttattcgaggtgacgaggtgcgccaaattgcgcctggtcaaaccggaaagattgccgattataactacaagctccccgacgactttacgggttgtgtgatcgcctggaatagcaataacctcgattctaaagttggcggtaattataactatctgtacagactctttaggaaaagtaatctcaagcccttttgcagggatatctcaaccgaaatctaccaagccggcagcactccttgcaatggtgtcgaggggtttaattgttatttcccactgcaatcttacggctttcaaccgactaatggagtcggttatcaaccctatagggtggtggtactctcctttgaacttttgcacgctccggcaacagtttgtggaccaaagaaaagtacgaaccttgttaagaataagtgtgttaatttcaattttaacggcctcactggaacaggtgtcctcacagaaagcaacaagaagtttctccctttccaacagtttggacgggatatcgccgacactactgacgccgtcagagatcctcaaactctcgaaatcttggatatcacaccatgttctttcggtggtgtctccgtcataacaccaggaactaacacctctaatcaagtggccgtgctctatcaggacgtcaattgcacagaagtgcctgtcgcaatccatgctgatcagctcactcccacctggcgtgtgtattccactggctctaatgtctttcagacacgggcaggttgccttattggggcagagcatgtgaacaattcctacgaatgcgatatacccattggggcaggcatttgcgccagctaccaaacccaaactaacagccccgggagtgccagcagcgtggcatctcagtccattattgcctatacgatgagcctgggtgctgaaaatagcgtggcttatagtaataactctatcgccatacccacaaacttcaccatttcagtgaccaccgaaatccttcctgtttctatgaccaaaacgtccgtcgattgtacaatgtacatttgcggcgatagcactgaatgttcaaacctgctcctgcaatacggctctttctgtactcagctcaaccgggcactcaccggcatagccgtcgaacaagacaagaatacccaggaagtctttgcgcaggtgaaacaaatctataagaccccaccaataaaagatttcggcggttttaatttcagccaaatcttgcctgatcccagcaagccatctaaacggtctttcattgaagatctcctgttcaacaaggttacgctggctgacgccgggtttattaagcaatatggcgattgccttggggacattgccgcacgagacctcatttgtgcccagaaattcaacgggctcaccgtattgcccccgctcctcacagacgaaatgatcgcccaatatacaagcgccctgcttgcgggaaccattacaagcggttggacctttggtgccggcgcagctctgcaaatacccttcgcaatgcaaatggcatatcggtttaatggaattggcgtaacccaaaacgtgctgtatgaaaaccagaaactgatcgcaaatcaattcaatagtgctataggaaagatccaagacagtctgtcttccactgctagcgcgctggggaagctccaagacgttgtgaaccaaaacgcgcaggccctgaataccctggtgaagcaactttcaagcaatttcggtgctatatcttctgtcctcaatgacattctctctcggctcgatcccccggaagccgaagttcagatagaccgtttgatcacaggccgcttgcaatccctgcaaacctacgttacacaacaactgattcgcgccgccgaaattcgggcatccgccaatctggccgcaaccaaaatgtccgagtgtgttctcggtcaatccaaacgcgtggatttctgcggaaaaggataccatttgatgtcatttccacaatcagctccacacggtgttgtattcctgcacgtgacctacgtgccagcccaggagaagaattttactactgcgcccgccatttgtcatgacgggaaggctcattttcctcgggaaggggttttcgtctcaaacggtacccattggttcgtgactcagaggaacttttatgaacctcaaatcataacgaccgataacacgtttgtaagtggcaattgcgacgtggtcatcgggattgtaaacaatactgtctatgaccctctccaaccagagcttgacagctttaaagaagagcttgataaatactttaagaaccatacctcaccagacgtcgatttgggagatatcagtggcattaatgcctctgtcgtcaatatccagaaagagattgaccgcttgaacgaagttgccaagaatcttaatgagtctctgattgacttgcaagaattgggaaaatatgaacaaggatatattccagaagcccctcgcgatgggcaagcatatgttcgaaaggatggggaatgggtgctgctcagcacctttctcggttgataa

SEQ ID NO: 117 - RNA, 3774 nt, Artificial Sequence
  Description of Artificial Sequence: Synthetic polynucleotide
gccaccauggacuggaccuggauacucuuucucguagcagcagccacacgagugcauucaauguuuguuuuccuuguucugcucccgcuugugucuucccagugcgugaaccugaccacccgaacucaacucccaccagcauacaccaacucauuuacaagaggaguuuauuacccggacaagguauuucgaaguucaguucuucacagcacccaagaccuguuucugccauucuucaguaaugucacuugguuucacgcgauacaugucagcgguacaaacgggacaaagcgauucgauaacccaguacucccauucaacgacggaguguauuuugcaucuacagagaaauccaacauuauacgcggguggaucuuuggaacuacucuggacuccaagacacagagccugcucauugugaacaaugcaacgaaugucgucauaaaagucugugaauuucaauuuugcaacgauccuuuccucggagucuauuaccauaagaacaauaagaguuggauggagagugaguuucgcgucuauucuuccgcgaacaauuguacauuugaauauguaucacaacccuuucuuauggauuuggaaggcaaacaagguaacuucaagaacuugcgcgaguucguguucaagaacauagacuguuauuuuaagaucuauaguaagcauacgccaaucaaucuggugcgagauuugccucagggcuuuucugcucuugaacccuugguugaucugcccaucgggaucaacauaaccagauuucaaacguugcucgcacuccaccgcagcuaucucacuccuggcgauuccucaucuggguggaccgccggagcugcugcuuauuacgucggcuaucuccagccgcguacuuuccugcucaaguauaaugagaauggcaccauuaccgaugcuguggauugugcucuugauccacucucugaaaccaaaugcacucucaagucuuuuaccguggaaaaggguauuuaucagacaucuaauuuucgggugcaaccuacugagucaauuguacgguuuccuaacauaacuaaccuuuguccauuuggggaagucuucaaugccacgcgguucgcaucagucuaugcauggaacagaaaacguaucuccaacugcgucgccgauuauuccguccuuuacaauagcgcuagcuuuuccacauucaaauguuauggcguaucaccaaccaaacuuaacgaucucugcuuuacuaaugucuacgcugacucuuucguuauucgaggugacgaggugcgccaaauugcgccuggucaaaccggaaagauugccgauuauaacuacaagcuccccgacgacuuuacggguugugugaucgccuggaauagcaauaaccucgauucuaaaguuggcgguaauuauaacuaucuguacagacucuuuaggaaaaguaaucucaagcccuuuugcagggauaucucaaccgaaaucuaccaagccggcagcacuccuugcaauggugucgagggguuuaauuguuauuucccacugcaaucuuacggcuuucaaccgacuaauggagucgguuaucaacccuauaggguggugguacucuccuuugaacuuuugcacgcuccggcaacaguuuguggaccaaagaaaaguacgaaccuuguuaagaauaaguguguuaauuucaauuuuaacggccucacuggaacagguguccucacagaaagcaacaagaaguuucucccuuuccaacaguuuggacgggauaucgccgacacuacugacgccgucagagauccucaaacucucgaaaucuuggauaucacaccauguucuuucgguggugucuccgucauaacaccaggaacuaacaccucuaaucaaguggccgugcucuaucaggacgucaauugcacagaagugccugucgcaauccaugcugaucagcucacucccaccuggcguguguauuccacuggcucuaaugucuuucagacacgggcagguugccuuauuggggcagagcaugugaacaauuccuacgaaugcgauauacccauuggggcaggcauuugcgccagcuaccaaacccaaacuaacagccccgggagugccagcagcguggcaucucaguccauuauugccuauacgaugagccugggugcugaaaauagcguggcuuauaguaauaacucuaucgccauacccacaaacuucaccauuucagugaccaccgaaauccuuccuguuucuaugaccaaaacguccgucgauuguacaauguacauuugcggcgauagcacugaauguucaaaccugcuccugcaauacggcucuuucuguacucagcucaaccgggcacucaccggcauagccgucgaacaagacaagaauacccaggaagucuuugcgcaggugaaacaaaucuauaagaccccaccaauaaaagauuucggcgguuuuaauuucagccaaaucuugccugaucccagcaagccaucuaaacggucuuucauugaagaucuccuguucaacaagguuacgcuggcugacgccggguuuauuaagcaauauggcgauugccuuggggacauugccgcacgagaccucauuugugcccagaaauucaacgggcucaccguauugcccccgcuccucacagacgaaaugaucgcccaauauacaagcgcccugcuugcgggaaccauuacaagcgguuggaccuuuggugccggcgcagcucugcaaauacccuucgcaaugcaaauggcauaucgguuuaauggaauuggcguaacccaaaacgugcuguaugaaaaccagaaacugaucgcaaaucaauucaauagugcuauaggaaagauccaagacagucugucuuccacugcuagcgcgcuggggaagcuccaagacguugugaaccaaaacgcgcaggcccugaauacccuggugaagcaacuuucaagcaauuucggugcuauaucuucuguccucaaugacauucucucucggcucgaucccccggaagccgaaguucagauagaccguuugaucacaggccgcuugcaaucccugcaaaccuacguuacacaacaacugauucgcgccgccgaaauucgggcauccgccaaucuggccgcaaccaaaauguccgaguguguucucggucaauccaaacgcguggauuucugcggaaaaggauaccauuugaugucauuuccacaaucagcuccacacgguguuguauuccugcacgugaccuacgugccagcccaggagaagaauuuuacuacugcgcccgccauuugucaugacgggaaggcucauuuuccucgggaagggguuuucgucucaaacgguacccauugguucgugacucagaggaacuuuuaugaaccucaaaucauaacgaccgauaacacguuuguaaguggcaauugcgacguggucaucgggauuguaaacaauacugucuaugacccucuccaaccagagcuugacagcuuuaaagaagagcuugauaaauacuuuaagaaccauaccucaccagacgucgauuugggagauaucaguggcauuaaugccucugucgucaauauccagaaagagauugaccgcuugaacgaaguugccaagaaucuuaaugagucucugauugacuugcaagaauugggaaaauaugaacaaggauauauuccagaagccccucgcgaugggcaagcauauguucgaaaggauggggaaugggugcugcucagcaccuuucucgguugauaa

SEQ ID NO: 118 - protein, 1254 aa, Artificial Sequence
  Description of Artificial Sequence: Synthetic polypeptide
MDWTWILFLVAAATRVHSMFVFLVLLPLVSSQCVNLTTRTQLPPAYTNSFTRGVYYPDKVFRSSVLHSTQDLFLPFFSNVTWFHAIHVSGTNGTKRFDNPVLPFNDGVYFASTEKSNIIRGWIFGTTLDSKTQSLLIVNNATNVVIKVCEFQFCNDPFLGVYYHKNNKSWMESEFRVYSSANNCTFEYVSQPFLMDLEGKQGNFKNLREFVFKNIDCYFKIYSKHTPINLVRDLPQGFSALEPLVDLPIGINITRFQTLLALHRSYLTPGDSSSGWTAGAAAYYVGYLQPRTFLLKYNENGTITDAVDCALDPLSETKCTLKSFTVEKGIYQTSNFRVQPTESIVRFPNITNLCPFGEVFNATRFASVYAWNRKRISNCVADYSVLYNSASFSTFKCYGVSPTKLNDLCFTNVYADSFVIRGDEVRQIAPGQTGKIADYNYKLPDDFTGCVIAWNSNNLDSKVGGNYNYLYRLFRKSNLKPFCRDISTEIYQAGSTPCNGVEGFNCYFPLQSYGFQPTNGVGYQPYRVVVLSFELLHAPATVCGPKKSTNLVKNKCVNFNFNGLTGTGVLTESNKKFLPFQQFGRDIADTTDAVRDPQTLEILDITPCSFGGVSVITPGTNTSNQVAVLYQDVNCTEVPVAIHADQLTPTWRVYSTGSNVFQTRAGCLIGAEHVNNSYECDIPIGAGICASYQTQTNSPGSASSVASQSIIAYTMSLGAENSVAYSNNSIAIPTNFTISVTTEILPVSMTKTSVDCTMYICGDSTECSNLLLQYGSFCTQLNRALTGIAVEQDKNTQEVFAQVKQIYKTPPIKDFGGFNFSQILPDPSKPSKRSFIEDLLFNKVTLADAGFIKQYGDCLGDIAARDLICAQKFNGLTVLPPLLTDEMIAQYTSALLAGTITSGWTFGAGAALQIPFAMQMAYRFNGIGVTQNVLYENQKLIANQFNSAIGKIQDSLSSTASALGKLQDVVNQNAQALNTLVKQLSSNFGAISSVLNDILSRLDPPEAEVQIDRLITGRLQSLQTYVTQQLIRAAEIRASANLAATKMSECVLGQSKRVDFCGKGYHLMSFPQSAPHGVVFLHVTYVPAQEKNFTTAPAICHDGKAHFPREGVFVSNGTHWFVTQRNFYEPQIITTDNTFVSGNCDVVIGIVNNTVYDPLQPELDSFKEELDKYFKNHTSPDVDLGDISGINASVVNIQKEIDRLNEVAKNLNESLIDLQELGKYEQGYIPEAPRDGQAYVRKDGEWVLLSTFLG

SEQ ID NO: 119 - DNA, 3774 bp, Artificial Sequence
  Description of Artificial Sequence: Synthetic polynucleotide
gccaccatggactggacctggatactctttctcgtagcagcagccacacgagtgcattcaatgtttgtgtttcttgtcctgttgccattggtgagctcccaatgtgtcaatctgaccacccggacacaattgccccctgcatatacaaattcattcacgagaggagtatactatcccgacaaagttttccggtcctcagtccttcattccactcaagatcttttccttccattcttttctaacgtaacctggttccatgcaattcatgtcagtgggaccaacggcacgaaacggtttgataatccagttcttccattcaatgacggagtatattttgcatcaactgagaaatctaatatcattagagggtggattttcggaacaactcttgactccaagacccaatccttgctcatcgttaacaatgctacaaatgtggttattaaggtctgtgagtttcaattctgtaacgacccctttctcggcgtatactaccataagaataataagtcttggatggagtctgaatttcgtgtctactcatcagcgaacaattgtacatttgaatatgtgtcccaaccattcctgatggatctcgaaggaaagcagggcaattttaagaaccttcgggagttcgtctttaagaatatcgatggatactttaaaatatatagtaaacacacaccaatcaatctggtccgagatctcccccagggttttagtgctctggagccgctggtggatttgcccatcggtatcaatattacgcgcttccaaacattgctcgccctgcatcggagttaccttacgcctggcgacagtagcagcggatggaccgctggagccgccgcctactatgtcgggtaccttcaaccacgcacttttctcctgaaatacaacgaaaatgggacaattacagacgctgttgattgcgcactcgatcccctgtcagaaacaaaatgtacacttaaatcttttacggtcgagaaagggatttaccagacatctaacttccgagtacaaccaaccgaatctatagtgcggttccccaacattacgaacctgtgcccgttcggcgaagtgttcaacgcaacacgatttgcttctgtttacgcttggaaccggaaacgcatctccaattgcgtcgccgattacagcgttctttataattctgcatctttctccaccttcaaatgctatggtgtctctcccacaaaactcaatgacctctgttttaccaatgtgtatgcggactccttcgtcatacgcggcgacgaggtgagacaaatcgcaccagggcagactggcaagatcgctgattataattacaaactgcctgatgattttaccggatgcgttattgcttggaattctaataacctcgattccaaagttggcgggaactacaattacctctaccgattgtttcgcaaatctaaccttaagccgtttgagagagatatcagcacagagatttatcaagctggctctaccccttgcaatggagtagaaggctttaactgctattttcctcttcagtcttatggatttcaacctaccaacggggtagggtaccaaccctatagagtcgtcgtgctctcatttgaactccttcacgcccccgctaccgtgtgtgggcctaagaaatccactaatctcgttaagaataagtgtgtgaattttaatttcaatggcctgacagggaccggggttctgactgaatctaacaagaaatttctgccgttccaacaattcgggcgcgatattgcagacacgaccgacgcggtgcgcgatcctcaaacactcgaaatccttgatatcactccttgttctttcggcggtgtaagcgtcattactcctggcaccaatacctctaaccaagtggcagtactctatcaagatgtgaactgcactgaggtcccggttgcaatacatgcggatcaactcaccccaacatggcgagtgtattccacagggagcaatgtgtttcaaacgagggccggctgtctcattggggccgaacacgttaataatagttatgagtgcgatattcccattggagcgggcatttgtgccagctatcagacccaaactaactcccccgggtccgcctcatcagtcgctagccaatctattattgcgtacacaatgtccctgggagctgaaaacagcgtggcctactcaaataacagcattgcaatacccacaaattttacgatttcagtaaccactgaaatcctgcccgtctccatgaccaaaacctctgtcgactgcactatgtacatatgcggcgactccaccgagtgttccaatctccttctccaatatggaagtttctgcacgcagttgaacagggcacttacagggattgcagtcgagcaagacaagaacacccaagaagtattcgcacaagtaaaacagatctacaagacacccccaatcaaagattttggtggcttcaacttctcccaaatacttccagatccgtcaaagccatccaaacgctcattcatcgaagaccttctgttcaataaggtcacattggcggatgctggatttatcaagcaatatggggattgtttgggagatattgcagcgcgggacctgatatgcgcgcaaaagttcaatgggttgacggtgctgccccctctcctcactgacgagatgatagctcagtatacgagcgctctcctcgcgggcactatcacctcaggttggaccttcggggctggcgcggcacttcaaataccatttgctatgcaaatggcctatcgttttaatggcatcggggtgacccaaaacgtgctctatgaaaaccagaaactgatagctaatcaattcaatagtgccatcggcaaaatccaggattcattgtccagcaccgcctcagctctcgggaaattgcaagacgtcgtcaaccaaaatgctcaagcgctcaacaccctcgttaaacaactctcaagtaatttcggcgcgattagtagcgtgctgaacgatatcttgagtcgtcttgatccacctgaagcagaagtccaaatcgacaggcttattaccggacgtctgcaaagcctgcaaacctacgttacacaacaacttataagggcagccgaaataagggcttctgcaaatctggctgccacgaagatgagcgagtgtgtcctcggacaaagcaaaagagttgacttttgcggcaaagggtaccaccttatgagtttccctcagtctgcgccccatggagtagtgtttctccacgtgacttatgtaccggcacaagaaaagaactttaccacagccccagcaatatgtcacgatggaaaagcacactttccacgggaaggggttttcgtgtccaacgggacccattggtttgttactcaacgcaacttttatgaaccccaaatcataaccactgataatacatttgtctctgggaactgtgatgtcgtgatcggaatagtcaacaacacagtgtatgatccgttgcaaccagagctggattccttcaaagaagaactcgacaagtattttaagaatcacacatcaccggacgtggatcttggagacatatcaggcataaacgctagtgtggtgaatatccaaaaggagatcgacaggcttaacgaagttgcaaagaacctcaatgaatctcttatcgatttgcaagaattgggcaaatacgagcaaggctacattcctgaagcaccacgggacgggcaagcttacgtgcggaaagatggcgaatgggtgctcttgagtacctttctgggttgataa

SEQ ID NO: 120 - RNA, 3774 nt, Artificial Sequence
  Description of Artificial Sequence: Synthetic polynucleotide
gccaccauggacuggaccuggauacucuuucucguagcagcagccacacgagugcauucaauguuuguguuucuuguccuguugccauuggugagcucccaaugugucaaucugaccacccggacacaauugcccccugcauauacaaauucauucacgagaggaguauacuaucccgacaaaguuuuccgguccucaguccuucauuccacucaagaucuuuuccuuccauucuuuucuaacguaaccugguuccaugcaauucaugucagugggaccaacggcacgaaacgguuugauaauccaguucuuccauucaaugacggaguauauuuugcaucaacugagaaaucuaauaucauuagaggguggauuuucggaacaacucuugacuccaagacccaauccuugcucaucguuaacaaugcuacaaaugugguuauuaaggucugugaguuucaauucuguaacgaccccuuucucggcguauacuaccauaagaauaauaagucuuggauggagucugaauuucgugucuacucaucagcgaacaauuguacauuugaauaugugucccaaccauuccugauggaucucgaaggaaagcagggcaauuuuaagaaccuucgggaguucgucuuuaagaauaucgauggauacuuuaaaauauauaguaaacacacaccaaucaaucugguccgagaucucccccaggguuuuagugcucuggagccgcugguggauuugcccaucgguaucaauauuacgcgcuuccaaacauugcucgcccugcaucggaguuaccuuacgccuggcgacaguagcagcggauggaccgcuggagccgccgccuacuaugucggguaccuucaaccacgcacuuuucuccugaaauacaacgaaaaugggacaauuacagacgcuguugauugcgcacucgauccccugucagaaacaaaauguacacuuaaaucuuuuacggucgagaaagggauuuaccagacaucuaacuuccgaguacaaccaaccgaaucuauagugcgguuccccaacauuacgaaccugugcccguucggcgaaguguucaacgcaacacgauuugcuucuguuuacgcuuggaaccggaaacgcaucuccaauugcgucgccgauuacagcguucuuuauaauucugcaucuuucuccaccuucaaaugcuauggugucucucccacaaaacucaaugaccucuguuuuaccaauguguaugcggacuccuucgucauacgcggcgacgaggugagacaaaucgcaccagggcagacuggcaagaucgcugauuauaauuacaaacugccugaugauuuuaccggaugcguuauugcuuggaauucuaauaaccucgauuccaaaguuggcgggaacuacaauuaccucuaccgauuguuucgcaaaucuaaccuuaagccguuugagagagauaucagcacagagauuuaucaagcuggcucuaccccuugcaauggaguagaaggcuuuaacugcuauuuuccucuucagucuuauggauuucaaccuaccaacgggguaggguaccaacccuauagagucgucgugcucucauuugaacuccuucacgcccccgcuaccgugugugggccuaagaaauccacuaaucucguuaagaauaagugugugaauuuuaauuucaauggccugacagggaccgggguucugacugaaucuaacaagaaauuucugccguuccaacaauucgggcgcgauauugcagacacgaccgacgcggugcgcgauccucaaacacucgaaauccuugauaucacuccuuguucuuucggcgguguaagcgucauuacuccuggcaccaauaccucuaaccaaguggcaguacucuaucaagaugugaacugcacugaggucccgguugcaauacaugcggaucaacucaccccaacauggcgaguguauuccacagggagcaauguguuucaaacgagggccggcugucucauuggggccgaacacguuaauaauaguuaugagugcgauauucccauuggagcgggcauuugugccagcuaucagacccaaacuaacucccccggguccgccucaucagucgcuagccaaucuauuauugcguacacaaugucccugggagcugaaaacagcguggccuacucaaauaacagcauugcaauacccacaaauuuuacgauuucaguaaccacugaaauccugcccgucuccaugaccaaaaccucugucgacugcacuauguacauaugcggcgacuccaccgaguguuccaaucuccuucuccaauauggaaguuucugcacgcaguugaacagggcacuuacagggauugcagucgagcaagacaagaacacccaagaaguauucgcacaaguaaaacagaucuacaagacacccccaaucaaagauuuugguggcuucaacuucucccaaauacuuccagauccgucaaagccauccaaacgcucauucaucgaagaccuucuguucaauaaggucacauuggcggaugcuggauuuaucaagcaauauggggauuguuugggagauauugcagcgcgggaccugauaugcgcgcaaaaguucaauggguugacggugcugcccccucuccucacugacgagaugauagcucaguauacgagcgcucuccucgcgggcacuaucaccucagguuggaccuucggggcuggcgcggcacuucaaauaccauuugcuaugcaaauggccuaucguuuuaauggcaucggggugacccaaaacgugcucuaugaaaaccagaaacugauagcuaaucaauucaauagugccaucggcaaaauccaggauucauuguccagcaccgccucagcucucgggaaauugcaagacgucgucaaccaaaaugcucaagcgcucaacacccucguuaaacaacucucaaguaauuucggcgcgauuaguagcgugcugaacgauaucuugagucgucuugauccaccugaagcagaaguccaaaucgacaggcuuauuaccggacgucugcaaagccugcaaaccuacguuacacaacaacuuauaagggcagccgaaauaagggcuucugcaaaucuggcugccacgaagaugagcgaguguguccucggacaaagcaaaagaguugacuuuugcggcaaaggguaccaccuuaugaguuucccucagucugcgccccauggaguaguguuucuccacgugacuuauguaccggcacaagaaaagaacuuuaccacagccccagcaauaugucacgauggaaaagcacacuuuccacgggaagggguuuucguguccaacgggacccauugguuuguuacucaacgcaacuuuuaugaaccccaaaucauaaccacugauaauacauuugucucugggaacugugaugucgugaucggaauagucaacaacacaguguaugauccguugcaaccagagcuggauuccuucaaagaagaacucgacaaguauuuuaagaaucacacaucaccggacguggaucuuggagacauaucaggcauaaacgcuaguguggugaauauccaaaaggagaucgacaggcuuaacgaaguugcaaagaaccucaaugaaucucuuaucgauuugcaagaauugggcaaauacgagcaaggcuacauuccugaagcaccacgggacgggcaagcuuacgugcggaaagauggcgaaugggugcucuugaguaccuuucuggguugauaa

SEQ ID NO: 121 - protein, 1254 aa, Artificial Sequence
  Description of Artificial Sequence: Synthetic polypeptide
MDWTWILFLVAAATRVHSMFVFLVLLPLVSSQCVNLTTRTQLPPAYTNSFTRGVYYPDKVFRSSVLHSTQDLFLPFFSNVTWFHAIHVSGTNGTKRFDNPVLPFNDGVYFASTEKSNIIRGWIFGTTLDSKTQSLLIVNNATNVVIKVCEFQFCNDPFLGVYYHKNNKSWMESEFRVYSSANNCTFEYVSQPFLMDLEGKQGNFKNLREFVFKNIDGYFKIYSKHTPINLVRDLPQGFSALEPLVDLPIGINITRFQTLLALHRSYLTPGDSSSGWTAGAAAYYVGYLQPRTFLLKYNENGTITDAVDCALDPLSETKCTLKSFTVEKGIYQTSNFRVQPTESIVRFPNITNLCPFGEVFNATRFASVYAWNRKRISNCVADYSVLYNSASFSTFKCYGVSPTKLNDLCFTNVYADSFVIRGDEVRQIAPGQTGKIADYNYKLPDDFTGCVIAWNSNNLDSKVGGNYNYLYRLFRKSNLKPFERDISTEIYQAGSTPCNGVEGFNCYFPLQSYGFQPTNGVGYQPYRVVVLSFELLHAPATVCGPKKSTNLVKNKCVNFNFNGLTGTGVLTESNKKFLPFQQFGRDIADTTDAVRDPQTLEILDITPCSFGGVSVITPGTNTSNQVAVLYQDVNCTEVPVAIHADQLTPTWRVYSTGSNVFQTRAGCLIGAEHVNNSYECDIPIGAGICASYQTQTNSPGSASSVASQSIIAYTMSLGAENSVAYSNNSIAIPTNFTISVTTEILPVSMTKTSVDCTMYICGDSTECSNLLLQYGSFCTQLNRALTGIAVEQDKNTQEVFAQVKQIYKTPPIKDFGGFNFSQILPDPSKPSKRSFIEDLLFNKVTLADAGFIKQYGDCLGDIAARDLICAQKFNGLTVLPPLLTDEMIAQYTSALLAGTITSGWTFGAGAALQIPFAMQMAYRFNGIGVTQNVLYENQKLIANQFNSAIGKIQDSLSSTASALGKLQDVVNQNAQALNTLVKQLSSNFGAISSVLNDILSRLDPPEAEVQIDRLITGRLQSLQTYVTQQLIRAAEIRASANLAATKMSECVLGQSKRVDFCGKGYHLMSFPQSAPHGVVFLHVTYVPAQEKNFTTAPAICHDGKAHFPREGVFVSNGTHWFVTQRNFYEPQIITTDNTFVSGNCDVVIGIVNNTVYDPLQPELDSFKEELDKYFKNHTSPDVDLGDISGINASVVNIQKEIDRLNEVAKNLNESLIDLQELGKYEQGYIPEAPRDGQAYVRKDGEWVLLSTFLG

SEQ ID NO: 122 - DNA, 3840 bp, Artificial Sequence
  Description of Artificial Sequence: Synthetic polynucleotide
ggatccgccaccatggattggacatggatattgttcttggttgcagcagctacccgggtacattccatgttcgtcttcctcgtactgctcccacttgtcagtagtcaatgtgtgaacttgactacccggacgcagttgcccccggcctacactaatagcataacgcgtggagtctattaccccgacaaggtgttcaggtcatccgtcctgtatagcactcaagatctcttcttgcccttctttagtaacgtcacttggttccatgcaatccacgtaagtggcactaatggcaccaagcgattcgacaatcccgtactcccttttaacgatggggtgtatttcgcgagcacagagaagtccaacatcatccgtggttggatcttcggcaccacactggattctaaaacccaaagcctgcttatagtaaataatgcaacaaacgtggtcattaaagtttgcgaatttcagttttgtaacgaccccttccttggcgtatattaccacaagaacaataaatcctggatggagagcgaatttagggtttacagttcagccaataattgtacattcgaatacgtaagccaacccttcttgatggacctggaaggaaagcaaggaaatttcaagaatctccgtgaattcgtgttcaagaacatagacggctattttaaaatatattcaaaacacacaccgattaacctggtacgagatcttccgcaaggattctctgcactggaaccgctggtcgatcttcctatcggcattaatatcactcggtttcaaacattgcttgctttgcatcggcgatatcttacacccggggatagctcaagtggatggactgccggggctgctgcctattacgtaggctatctccaaccacggacattcctgctgaaatataacgagaatgggacaatcacagatgctgttgactgcgctttggaccctttgagcgaaacaaagtgcacactcaaatccttcaccgtggaaaagggaatctaccaaacgtctaattttcgcgtccaaccaaccgagagcatcgtcagattcccaaacattactaatctttgcccctttggcgaagtcttcaatgctacgcgatttgcgtccgtctacgcgtggaatcggaagcgcattagcaattgcgtcgcagactattcctttctctataactctgcatccttttctacctttaaatgttatggagtcaacgggacaaagctcaatgacctttgctttacaaatgtctatgcagactcttttgtcatccgtggtgatgaggtacgacagatcgcgccaggacaaaccgggaagatcgccgattacaactacaaactgcccgacgatttcaccgggtgcgttattgcttggaactccaataatcttgatagtaaagttggcggcaactacaactacctgtatcgacttttccgtaaaagtaatctcaagccatttgaaagagacatcaacacaacaatttatcaggctggatctaccccatgcaacggcgttgaaggatttaactgctacttccctctccaaagttacggtttccaaccaacaaacggcgttggctatcaaccttatagagtcgttgtcctctcttttgagcttaaccatgccccagcgacagtgtgtgggccgaagaaaagcactaatttggttaagaataaatgtgttaactttaattttaatggattgacggggacaggggttctgacagagtctaacaagaaatttctgccgttccaacagtttgggcgagatattgcagataccacggacgccgttcgagacccccaaacacttgaaattctcgatataactccctgcagctttggcggtgtatccgttatcacgcccgggacaaataccagtaaccaagtcgcagtcctgtatcaaggcgtaaattgtacggaagtgcccgttgctatacacgctgaccaactgactcccacatggagagtctatagtactggttctaatgtgttccaaacacgagccggttgcctgatcggagccgaacatgttaacaactcatacgaatgtgacataccgattggcgccggcatttgcgccagctatcaaacgcagaccaactcaccaagaaggcgtcgcagtgtagcaagtcaatctattatagcgtataccatgtctttgggagcagaaaactccgttgcttactctaataattctattgctatcccaaccaattttacaatctcagttactaccgaaatactgccggtaagcatgactaagacatccgtggattgcactatgtacatctgtggggactcaacagagtgtagtaatttgctgcttcaatatggctccttctgcactcaactgaatcgtgctctcacgggaattgctgttgagcaagataagaatacccaggaagtgtttgcccaagtcaaacaaatttataagacaccaccaattaaagattttggtggatttaatttcagccaaatacttccagatccctcacgcagacgacggtctttcatcgaggaccttctgttcaacaaagttactctggctgatgcaggcttcattaagcagtacggtgattgtcttggagacatcgctgcgcgcgacctcatatgcgcccagaaatttaatgggctgaccgtacttccccctttgctgactgatgagatgattgcacaatacacttccgcactccttgcgggtactatcacatccgggtggacttttggagctggcgccgctcttcaaattcccttcgccatgcaaatggcgtacaggtttaatggcatcggtgtgacacagaatgtgctctatgagaaccagaaacttatcgcaaaccagttcaattcagccatcgggaaaatccaagatagtctcagtagtactgcctcagctctcggcaagctccaggatgtagtgaatcagaatgcacaagccttgaacactctcgttaaacaactttcttccaactttggtgccatcagcagtgggcctaacgatatattgagccgcttgcccaaagtggaagcggaagtccaaatagatagacttattaccggccggctgcaatctctgcaaacctatgtgactcaacaattgatccgagctgccgaaatccgtgccagtgcaaatctcgccgcgaccaagatgagcgaatgtgtcttgggacagagcaaaagagtcgatttctgcggaaaaggctaccacctgatgtctttccctcaatctgccccgcacggagtggtctttctccatgtgacttatgtgccagcccaagaaaagaactttacaaccgcaccggcaatttgccatgacggaaaggcgcatttcccccgtgagggagtctttgtgagcaacgggacccattggttcgtgacacaacgcaatttctatgagcctcagatcattaccacggacaatactttcgtgtctggcaactgtgacgtgctgataggcatcgtgaataataccgtctacgatcccttgcaacttgaactggactcattcaaagaagagctggataagtattttaagaaccatacaagccctgatgtcgatcttggggatatatcaggcataaacgcatctgttgtgaatatccaaaaggaaattgatagattgaacgaagttgccaagaacctcaatgaaagtcttatcgacctgcaagaactgggaaaatatgagcaatatataaaatggccatggagcgggcgccggagacggagaaggggtagcggcggtagtggtagcgggtacatcccagaggcacccagagatggacaagcttacgtaaggaaggacggggaatgggtgctgctcagtacatttcttggatgataa

SEQ ID NO: 123 - RNA, 3840 nt, Artificial Sequence
  Description of Artificial Sequence: Synthetic polynucleotide
ggauccgccaccauggauuggacauggauauuguucuugguugcagcagcuacccggguacauuccauguucgucuuccucguacugcucccacuugucaguagucaaugugugaacuugacuacccggacgcaguugcccccggccuacacuaauagcauaacgcguggagucuauuaccccgacaagguguucaggucauccguccuguauagcacucaagaucucuucuugcccuucuuuaguaacgucacuugguuccaugcaauccacguaaguggcacuaauggcaccaagcgauucgacaaucccguacucccuuuuaacgaugggguguauuucgcgagcacagagaaguccaacaucauccgugguuggaucuucggcaccacacuggauucuaaaacccaaagccugcuuauaguaaauaaugcaacaaacguggucauuaaaguuugcgaauuucaguuuuguaacgaccccuuccuuggcguauauuaccacaagaacaauaaauccuggauggagagcgaauuuaggguuuacaguucagccaauaauuguacauucgaauacguaagccaacccuucuugauggaccuggaaggaaagcaaggaaauuucaagaaucuccgugaauucguguucaagaacauagacggcuauuuuaaaauauauucaaaacacacaccgauuaaccugguacgagaucuuccgcaaggauucucugcacuggaaccgcuggucgaucuuccuaucggcauuaauaucacucgguuucaaacauugcuugcuuugcaucggcgauaucuuacacccggggauagcucaaguggauggacugccggggcugcugccuauuacguaggcuaucuccaaccacggacauuccugcugaaauauaacgagaaugggacaaucacagaugcuguugacugcgcuuuggacccuuugagcgaaacaaagugcacacucaaauccuucaccguggaaaagggaaucuaccaaacgucuaauuuucgcguccaaccaaccgagagcaucgucagauucccaaacauuacuaaucuuugccccuuuggcgaagucuucaaugcuacgcgauuugcguccgucuacgcguggaaucggaagcgcauuagcaauugcgucgcagacuauuccuuucucuauaacucugcauccuuuucuaccuuuaaauguuauggagucaacgggacaaagcucaaugaccuuugcuuuacaaaugucuaugcagacucuuuugucauccguggugaugagguacgacagaucgcgccaggacaaaccgggaagaucgccgauuacaacuacaaacugcccgacgauuucaccgggugcguuauugcuuggaacuccaauaaucuugauaguaaaguuggcggcaacuacaacuaccuguaucgacuuuuccguaaaaguaaucucaagccauuugaaagagacaucaacacaacaauuuaucaggcuggaucuaccccaugcaacggcguugaaggauuuaacugcuacuucccucuccaaaguuacgguuuccaaccaacaaacggcguuggcuaucaaccuuauagagucguuguccucucuuuugagcuuaaccaugccccagcgacagugugugggccgaagaaaagcacuaauuugguuaagaauaaauguguuaacuuuaauuuuaauggauugacggggacagggguucugacagagucuaacaagaaauuucugccguuccaacaguuugggcgagauauugcagauaccacggacgccguucgagacccccaaacacuugaaauucucgauauaacucccugcagcuuuggcgguguauccguuaucacgcccgggacaaauaccaguaaccaagucgcaguccuguaucaaggcguaaauuguacggaagugcccguugcuauacacgcugaccaacugacucccacauggagagucuauaguacugguucuaauguguuccaaacacgagccgguugccugaucggagccgaacauguuaacaacucauacgaaugugacauaccgauuggcgccggcauuugcgccagcuaucaaacgcagaccaacucaccaagaaggcgucgcaguguagcaagucaaucuauuauagcguauaccaugucuuugggagcagaaaacuccguugcuuacucuaauaauucuauugcuaucccaaccaauuuuacaaucucaguuacuaccgaaauacugccgguaagcaugacuaagacauccguggauugcacuauguacaucuguggggacucaacagaguguaguaauuugcugcuucaauauggcuccuucugcacucaacugaaucgugcucucacgggaauugcuguugagcaagauaagaauacccaggaaguguuugcccaagucaaacaaauuuauaagacaccaccaauuaaagauuuugguggauuuaauuucagccaaauacuuccagaucccucacgcagacgacggucuuucaucgaggaccuucuguucaacaaaguuacucuggcugaugcaggcuucauuaagcaguacggugauugucuuggagacaucgcugcgcgcgaccucauaugcgcccagaaauuuaaugggcugaccguacuucccccuuugcugacugaugagaugauugcacaauacacuuccgcacuccuugcggguacuaucacauccggguggacuuuuggagcuggcgccgcucuucaaauucccuucgccaugcaaauggcguacagguuuaauggcaucggugugacacagaaugugcucuaugagaaccagaaacuuaucgcaaaccaguucaauucagccaucgggaaaauccaagauagucucaguaguacugccucagcucucggcaagcuccaggauguagugaaucagaaugcacaagccuugaacacucucguuaaacaacuuucuuccaacuuuggugccaucagcagugggccuaacgauauauugagccgcuugcccaaaguggaagcggaaguccaaauagauagacuuauuaccggccggcugcaaucucugcaaaccuaugugacucaacaauugauccgagcugccgaaauccgugccagugcaaaucucgccgcgaccaagaugagcgaaugugucuugggacagagcaaaagagucgauuucugcggaaaaggcuaccaccugaugucuuucccucaaucugccccgcacggaguggucuuucuccaugugacuuaugugccagcccaagaaaagaacuuuacaaccgcaccggcaauuugccaugacggaaaggcgcauuucccccgugagggagucuuugugagcaacgggacccauugguucgugacacaacgcaauuucuaugagccucagaucauuaccacggacaauacuuucgugucuggcaacugugacgugcugauaggcaucgugaauaauaccgucuacgaucccuugcaacuugaacuggacucauucaaagaagagcuggauaaguauuuuaagaaccauacaagcccugaugucgaucuuggggauauaucaggcauaaacgcaucuguugugaauauccaaaaggaaauugauagauugaacgaaguugccaagaaccucaaugaaagucuuaucgaccugcaagaacugggaaaauaugagcaauauauaaaauggccauggagcgggcgccggagacggagaagggguagcggcgguagugguagcggguacaucccagaggcacccagagauggacaagcuuacguaaggaaggacggggaaugggugcugcucaguacauuucuuggaugauaa

SEQ ID NO: 124 - protein, 1274 aa, Artificial Sequence
  Description of Artificial Sequence: Synthetic polypeptide
MDWTWILFLVAAATRVHSMFVFLVLLPLVSSQCVNLTTRTQLPPAYTNSFTRGVYYPDKVFRSSVLHSTQDLFLPFFSNVTWFHAIHVSGTNGTKRFDNPVLPFNDGVYFASTEKSNIIRGWIFGTTLDSKTQSLLIVNNATNVVIKVCEFQFCNDPFLGVYYHKNNKSWMESEFRVYSSANNCTFEYVSQPFLMDLEGKQGNFKNLREFVFKNIDGYFKIYSKHTPINLVRDLPQGFSALEPLVDLPIGINITRFQTLLALHRSYLTPGDSSSGWTAGAAAYYVGYLQPRTFLLKYNENGTITDAVDCALDPLSETKCTLKSFTVEKGIYQTSNFRVQPTESIVRFPNITNLCPFGEVFNATRFASVYAWNRKRISNCVADYSVLYNSASFSTFKCYGVNGTKLNDLCFTNVYADSFVIRGDEVRQIAPGQTGKIADYNYKLPDDFTGCVIAWNSNNLDSKVGGNYNYLYRLFRKSNLKPFERDINTTIYQAGSTPCNGVEGFNCYFPLQSYGFQPTNGVGYQPYRVVVLSFELNHAPATVCGPKKSTNLVKNKCVNFNFNGLTGTGVLTESNKKFLPFQQFGRDIADTTDAVRDPQTLEILDITPCSFGGVSVITPGTNTSNQVAVLYQDVNCTEVPVAIHADQLTPTWRVYSTGSNVFQTRAGCLIGAEHVNNSYECDIPIGAGICASYQTQTNSPRRRRSVASQSIIAYTMSLGAENSVAYSNNSIAIPTNFTISVTTEILPVSMTKTSVDCTMYICGDSTECSNLLLQYGSFCTQLNRALTGIAVEQDKNTQEVFAQVKQIYKTPPIKDFGGFNFSQILPDPSRRRRSFIEDLLFNKVTLADAGFIKQYGDCLGDIAARDLICAQKFNGLTVLPPLLTDEMIAQYTSALLAGTITSGWTFGAGAALQIPFAMQMAYRFNGIGVTQNVLYENQKLIANQFNSAIGKIQDSLSSTASALGKLQDVVNQNAQALNTLVKQLSSNFGAISSGPNDILSRLPKVEAEVQIDRLITGRLQSLQTYVTQQLIRAAEIRASANLAATKMSECVLGQSKRVDFCGKGYHLMSFPQSAPHGVVFLHVTYVPAQEKNFTTAPAICHDGKAHFPREGVFVSNGTHWFVTQRNFYEPQIITTDNTFVSGNCDVVIGIVNNTVYDPLQPELDSFKEELDKYFKNHTSPDVDLGDISGINASVVNIQKEIDRLNEVAKNLNESLIDLQELGKYEQYIKWPWSGRRRRRRGSGGSGSGYIPEAPRDGQAYVRKDGEWVLLSTFLG

SEQ ID NO: 125 - DNA, 3711 bp, Artificial Sequence
  Description of Artificial Sequence: Synthetic polynucleotide
ggatccgccaccatggactggacgtggattttgtttcttgtcgctgcagctacccgggttcactccatgtttgttttcctggtgctccttccccttgtaagctcacaatgcgtcaatttgaccacgcgtacacaactgcccccagcatatactaattctttcacacgcggggtctactatcccgataaagtctttagaagtagcgtacttcatagtacccaagatttgtttctgcccttcttcagcaatgtcacgtggtttcatgcgatccatgtatccggcacgaacgggacaaaacgatttgataaccccgtgctccccttcaacgacggggtttatttcgccagcaccgagaaatcaaatattatcaggggctggattttcgggacaacacttgattccaagacacaatctcttcttatcgtgaataatgcaactaatgtggtgatcaaggtttgcgagttccaattttgtaatgacccttttcttggcgtgtactatcataagaataacaagagttggatggaatcagagttccgggtctacagcagtgctaacaattgtacgtttgaatacgtttctcagccttttctgatggaccttgaaggtaagcaaggcaatttcaagaacttgcgggaatttgtcttcaagaacatagatggctattttaagatatatagcaaacacactcccataaatctcgtcagagatcttccacagggctttagcgccctggaaccattggttgatttgccaattggaataaacataactcgattccaaaccttgctcgcactccatcggagctacctgacgcctggagattcctcttccggctggactgccggagcagcagcttattatgtaggctacttgcaaccccgcacgttcctgctcaaatataatgaaaatggcactataaccgatgcggtagactgcgctcttgatcccctgagtgaaactaaatgtacgttgaaaagctttactgtagagaaaggcatctatcagactagtaactttagggtgcaacccacggagtccattgtacggttcccaaacattaccaacctctgtccattcggagaagtgtttaatgccacaagattcgcttcagtgtatgcctggaaccggaaacgcatctcaaattgcgttgccgattattcagtactttacaactcagccagtttctctacttttaagtgctatggcgtttccccgacgaagctcaatgatctgtgctttactaacgtttacgcagactctttcgtcatcagaggcgatgaagtcaggcaaatagctcctggtcaaaccggcaagatcgccgactacaactataaactgcccgatgatttcactgggtgtgtgatcgcgtggaattccaataatttggactctaaggtaggtggcaactataactacctctatcgactcttccgaaaatccaaccttaagccgtttgaacgcgatattagtaccgaaatataccaagccgggtctacaccctgtaacggcgttgaaggtttcaattgttactttccactgcagagttatggctttcaacccaccaacggggttggctatcagccctatagggttgtggtcctcagttttgagcttctgcatgcaccagcaaccgtgtgcggacctaagaagtcaacaaatctcgtgaagaacaagtgtgttaatttcaatttcaatggccttacagggaccggagtgcttacagaaagcaataagaagttcttgccctttcaacagttcggcagggacatagcggacacgacagatgcagttcgagacccgcaaactctcgaaattctggatatcacaccttgcagttttggtggcgtgtctgttatcacaccaggcaccaacacttccaaccaggtggcagttttgtaccaggatgttaattgtacagaggtcccagtggcaatacacgctgaccaactgactccaacttggagagtctactctacaggctcaaacgtcttccaaacacgggcggggtgtctgatcggagcagaacacgttaataacagttacgagtgtgatatcccgataggagctggtatttgcgcttcataccagacgcaaacgaactcaccacgaagacgccggtcagttgcatcacaatccattattgcatacaccatgtcactcggagcggagaattctgtagcatacagtaacaatagtatcgcaatacctacgaactttaccatttccgtcacaactgaaatcttgcccgtctcaatgacaaagacaagcgtagattgtacaatgtatatttgcggagattcaacagagtgctccaacctgctgctccagtacggtagtttctgtacccagctcaatagggccctcaccggaattgcagttgaacaagacaagaacacccaagaagtgtttgcacaagtcaaacaaatctataaaacacccccaatcaaagatttcggtggcttcaacttttcacaaattctccctgatcctagccgccgccgcagatcattcatcgaagacttgctcttcaataaggttaccctggcagacgccggttttattaaacaatacggagattgcctcggtgacatcgccgctagagaccttatctgtgcccaaaagttcaacggactcaccgtgctgcccccattgctgaccgatgaaatgattgctcaatatacatctgcgctcctcgcagggaccattacttcagggtggacttttggggctggcgccgcattgcagattcccttcgccatgcagatggcatataggtttaacggcattggagttacccaaaatgtactctacgagaaccaaaagctgattgcaaatcagttcaacagtgcaataggcaaaatacaagactctctgtcttcaaccgccagcgctcttggaaagctccaagatgttgttaatcaaaatgcccaagcgttgaataccctcgtgaagcaactctccagcaattttggtgccatctctagcgtgctgaacgacattctgtcacggctcgatcccccggaagccgaggtacaaattgaccgattgataaccgggcgactccaaagccttcagacctacgttacacaacagctcattcgcgctgcagaaattagagcctctgcaaatcttgcagctacaaagatgtcagagtgcgttctcggtcaaagcaaaagagtggatttctgcggaaaggggtaccacctcatgagtttcccacagagtgcccctcatggcgtagtctttcttcatgttacttatgtaccagcccaagaaaagaatttcactacagcacccgcgatttgtcatgatggcaaagcgcacttccctcgggaaggcgtgttcgtgtctaatggaacacattggttcgtgacgcaacggaatttctacgagccccaaattatcactactgataacaccttcgtctccggaaactgcgatgttgttattggcattgtcaacaataccgtttacgacccgctccaacctgagctggattcatttaaagaggaattggacaaatattttaagaatcatacctctccagacgtggatttgggtgacattagcggaataaatgcatctgtggtcaatatccaaaaggaaattgataggctgaacgaggtcgccaagaatttgaacgaatctttgattgatcttcaagaacttggcaagtatgaacaatacataaaatggccctggtgatag

SEQ ID NO: 126 - RNA, 3711 nt, Artificial Sequence
  Description of Artificial Sequence: Synthetic polynucleotide
ggauccgccaccauggacuggacguggauuuuguuucuugucgcugcagcuacccggguucacuccauguuuguuuuccuggugcuccuuccccuuguaagcucacaaugcgucaauuugaccacgcguacacaacugcccccagcauauacuaauucuuucacacgcggggucuacuaucccgauaaagucuuuagaaguagcguacuucauaguacccaagauuuguuucugcccuucuucagcaaugucacgugguuucaugcgauccauguauccggcacgaacgggacaaaacgauuugauaaccccgugcuccccuucaacgacgggguuuauuucgccagcaccgagaaaucaaauauuaucaggggcuggauuuucgggacaacacuugauuccaagacacaaucucuucuuaucgugaauaaugcaacuaauguggugaucaagguuugcgaguuccaauuuuguaaugacccuuuucuuggcguguacuaucauaagaauaacaagaguuggauggaaucagaguuccgggucuacagcagugcuaacaauuguacguuugaauacguuucucagccuuuucugauggaccuugaagguaagcaaggcaauuucaagaacuugcgggaauuugucuucaagaacauagauggcuauuuuaagauauauagcaaacacacucccauaaaucucgucagagaucuuccacagggcuuuagcgcccuggaaccauugguugauuugccaauuggaauaaacauaacucgauuccaaaccuugcucgcacuccaucggagcuaccugacgccuggagauuccucuuccggcuggacugccggagcagcagcuuauuauguaggcuacuugcaaccccgcacguuccugcucaaauauaaugaaaauggcacuauaaccgaugcgguagacugcgcucuugauccccugagugaaacuaaauguacguugaaaagcuuuacuguagagaaaggcaucuaucagacuaguaacuuuagggugcaacccacggaguccauuguacgguucccaaacauuaccaaccucuguccauucggagaaguguuuaaugccacaagauucgcuucaguguaugccuggaaccggaaacgcaucucaaauugcguugccgauuauucaguacuuuacaacucagccaguuucucuacuuuuaagugcuauggcguuuccccgacgaagcucaaugaucugugcuuuacuaacguuuacgcagacucuuucgucaucagaggcgaugaagucaggcaaauagcuccuggucaaaccggcaagaucgccgacuacaacuauaaacugcccgaugauuucacugggugugugaucgcguggaauuccaauaauuuggacucuaagguagguggcaacuauaacuaccucuaucgacucuuccgaaaauccaaccuuaagccguuugaacgcgauauuaguaccgaaauauaccaagccgggucuacacccuguaacggcguugaagguuucaauuguuacuuuccacugcagaguuauggcuuucaacccaccaacgggguuggcuaucagcccuauaggguugugguccucaguuuugagcuucugcaugcaccagcaaccgugugcggaccuaagaagucaacaaaucucgugaagaacaaguguguuaauuucaauuucaauggccuuacagggaccggagugcuuacagaaagcaauaagaaguucuugcccuuucaacaguucggcagggacauagcggacacgacagaugcaguucgagacccgcaaacucucgaaauucuggauaucacaccuugcaguuuugguggcgugucuguuaucacaccaggcaccaacacuuccaaccagguggcaguuuuguaccaggauguuaauuguacagaggucccaguggcaauacacgcugaccaacugacuccaacuuggagagucuacucuacaggcucaaacgucuuccaaacacgggcggggugucugaucggagcagaacacguuaauaacaguuacgagugugauaucccgauaggagcugguauuugcgcuucauaccagacgcaaacgaacucaccacgaagacgccggucaguugcaucacaauccauuauugcauacaccaugucacucggagcggagaauucuguagcauacaguaacaauaguaucgcaauaccuacgaacuuuaccauuuccgucacaacugaaaucuugcccgucucaaugacaaagacaagcguagauuguacaauguauauuugcggagauucaacagagugcuccaaccugcugcuccaguacgguaguuucuguacccagcucaauagggcccucaccggaauugcaguugaacaagacaagaacacccaagaaguguuugcacaagucaaacaaaucuauaaaacacccccaaucaaagauuucgguggcuucaacuuuucacaaauucucccugauccuagccgccgccgcagaucauucaucgaagacuugcucuucaauaagguuacccuggcagacgccgguuuuauuaaacaauacggagauugccucggugacaucgccgcuagagaccuuaucugugcccaaaaguucaacggacucaccgugcugcccccauugcugaccgaugaaaugauugcucaauauacaucugcgcuccucgcagggaccauuacuucaggguggacuuuuggggcuggcgccgcauugcagauucccuucgccaugcagauggcauauagguuuaacggcauuggaguuacccaaaauguacucuacgagaaccaaaagcugauugcaaaucaguucaacagugcaauaggcaaaauacaagacucucugucuucaaccgccagcgcucuuggaaagcuccaagauguuguuaaucaaaaugcccaagcguugaauacccucgugaagcaacucuccagcaauuuuggugccaucucuagcgugcugaacgacauucugucacggcucgaucccccggaagccgagguacaaauugaccgauugauaaccgggcgacuccaaagccuucagaccuacguuacacaacagcucauucgcgcugcagaaauuagagccucugcaaaucuugcagcuacaaagaugucagagugcguucucggucaaagcaaaagaguggauuucugcggaaagggguaccaccucaugaguuucccacagagugccccucauggcguagucuuucuucauguuacuuauguaccagcccaagaaaagaauuucacuacagcacccgcgauuugucaugauggcaaagcgcacuucccucgggaaggcguguucgugucuaauggaacacauugguucgugacgcaacggaauuucuacgagccccaaauuaucacuacugauaacaccuucgucuccggaaacugcgauguuguuauuggcauugucaacaauaccguuuacgacccgcuccaaccugagcuggauucauuuaaagaggaauuggacaaauauuuuaagaaucauaccucuccagacguggauuugggugacauuagcggaauaaaugcaucuguggucaauauccaaaaggaaauugauaggcugaacgaggucgccaagaauuugaacgaaucuuugauugaucuucaagaacuuggcaaguaugaacaauacauaaaauggcccuggugauag

SEQ ID NO: 127 - protein, 1231 aa, Artificial Sequence
  Description of Artificial Sequence: Synthetic polypeptide
MDWTWILFLVAAATRVHSMFVFLVLLPLVSSQCVNLTTRTQLPPAYTNSFTRGVYYPDKVFRSSVLHSTQDLFLPFFSNVTWFHAIHVSGTNGTKRFDNPVLPFNDGVYFASTEKSNIIRGWIFGTTLDSKTQSLLIVNNATNVVIKVCEFQFCNDPFLGVYYHKNNKSWMESEFRVYSSANNCTFEYVSQPFLMDLEGKQGNFKNLREFVFKNIDGYFKIYSKHTPINLVRDLPQGFSALEPLVDLPIGINITRFQTLLALHRSYLTPGDSSSGWTAGAAAYYVGYLQPRTFLLKYNENGTITDAVDCALDPLSETKCTLKSFTVEKGIYQTSNFRVQPTESIVRFPNITNLCPFGEVFNATRFASVYAWNRKRISNCVADYSVLYNSASFSTFKCYGVSPTKLNDLCFTNVYADSFVIRGDEVRQIAPGQTGKIADYNYKLPDDFTGCVIAWNSNNLDSKVGGNYNYLYRLFRKSNLKPFERDISTEIYQAGSTPCNGVEGFNCYFPLQSYGFQPTNGVGYQPYRVVVLSFELLHAPATVCGPKKSTNLVKNKCVNFNFNGLTGTGVLTESNKKFLPFQQFGRDIADTTDAVRDPQTLEILDITPCSFGGVSVITPGTNTSNQVAVLYQDVNCTEVPVAIHADQLTPTWRVYSTGSNVFQTRAGCLIGAEHVNNSYECDIPIGAGICASYQTQTNSPRRRRSVASQSIIAYTMSLGAENSVAYSNNSIAIPTNFTISVTTEILPVSMTKTSVDCTMYICGDSTECSNLLLQYGSFCTQLNRALTGIAVEQDKNTQEVFAQVKQIYKTPPIKDFGGFNFSQILPDPSRRRRSFIEDLLFNKVTLADAGFIKQYGDCLGDIAARDLICAQKFNGLTVLPPLLTDEMIAQYTSALLAGTITSGWTFGAGAALQIPFAMQMAYRFNGIGVTQNVLYENQKLIANQFNSAIGKIQDSLSSTASALGKLQDVVNQNAQALNTLVKQLSSNFGAISSVLNDILSRLDPPEAEVQIDRLITGRLQSLQTYVTQQLIRAAEIRASANLAATKMSECVLGQSKRVDFCGKGYHLMSFPQSAPHGVVFLHVTYVPAQEKNFTTAPAICHDGKAHFPREGVFVSNGTHWFVTQRNFYEPQIITTDNTFVSGNCDVVIGIVNNTVYDPLQPELDSFKEELDKYFKNHTSPDVDLGDISGINASVVNIQKEIDRLNEVAKNLNESLIDLQELGKYEQYIKWPW

SEQ ID NO: 128 - DNA, 3840 bp, Artificial Sequence
  Description of Artificial Sequence: Synthetic polynucleotide
ggatccgccaccatggattggacatggatattgttcttggttgcagcagctacccgggtacattccatgttcgtcttcctcgtactgctcccacttgtcagtagtcaatgtgtgaacttgactacccggacgcagttgcccccggcctacactaatagctttacgcgtggagtctattaccccgacaaggtgttcaggtcatccgtcctgcatagcactcaagatctcttcttgcccttctttagtaacgtcacttggttccatgcaatccacgtaagtggcactaatggcaccaagcgattcgacaatcccgtactcccttttaacgatggggtgtatttcgcgagcacagagaagtccaacatcatccgtggttggatcttcggcaccacactggattctaaaacccaaagcctgcttatagtaaataatgcaacaaacgtggtcattaaagtttgcgaatttcagttttgtaacgaccccttccttggcgtatattaccacaagaacaataaatcctggatggagagcgaatttagggtttacagttcagccaataattgtacattcgaatacgtaagccaacccttcttgatggacctggaaggaaagcaaggaaatttcaagaatctccgtgaattcgtgttcaagaacatagacggctattttaaaatatattcaaaacacacaccgattaacctggtacgagatcttccgcaaggattctctgcactggaaccgctggtcgatcttcctatcggcattaatatcactcggtttcaaacattgcttgctttgcatcggagttatcttacacccggggatagctcaagtggatggactgccggggctgctgcctattacgtaggctatctccaaccacggacattcctgctgaaatataacgagaatgggacaatcacagatgctgttgactgcgctttggaccctttgagcgaaacaaagtgcacactcaaatccttcaccgtggaaaagggaatctaccaaacgtctaattttcgcgtccaaccaaccgagagcatcgtcagattcccaaacattactaatctttgcccctttggcgaagtcttcaatgctacgcgatttgcgtccgtctacgcgtggaatcggaagcgcattagcaattgcgtcgcagactattccgtgctctataactctgcatccttttctacctttaaatgttatggagtcaacgggacaaagctcaatgacctttgctttacaaatgtctatgcagactcttttgtcatccgtggtgatgaggtacgacagatcgcgccaggacaaaccgggaagatcgccgattacaactacaaactgcccgacgatttcaccgggtgcgttattgcttggaactccaataatcttgatagtaaagttggcggcaactacaactacctgtatcgacttttccgtaaaagtaatctcaagccatttgaaagagacatcaacacaacaatttatcaggctggatctaccccatgcaacggcgttgaaggatttaactgctacttccctctccaaagttacggtttccaaccaacaaacggcgttggctatcaaccttatagagtcgttgtcctctcttttgagcttaaccatgccccagcgacagtgtgtgggccgaagaaaagcactaatttggttaagaataaatgtgttaactttaattttaatggattgacggggacaggggttctgacagagtctaacaagaaatttctgccgttccaacagtttgggcgagatattgcagataccacggacgccgttcgagacccccaaacacttgaaattctcgatataactccctgcagctttggcggtgtatccgttatcacgcccgggacaaataccagtaaccaagtcgcagtcctgtatcaagacgtaaattgtacggaagtgcccgttgctatacacgctgaccaactgactcccacatggagagtctatagtactggttctaatgtgttccaaacacgagccggttgcctgatcggagccgaacatgttaacaactcatacgaatgtgacataccgattggcgccggcatttgcgccagctatcaaacgcagaccaactcaccaagaaggcgtcgcagtgtagcaagtcaatctattatagcgtataccatgtctttgggagcagaaaactccgttgcttactctaataattctattgctatcccaaccaattttacaatctcagttactaccgaaatactgccggtaagcatgactaagacatccgtggattgcactatgtacatctgtggggactcaacagagtgtagtaatttgctgcttcaatatggctccttctgcactcaactgaatcgtgctctcacgggaattgctgttgagcaagataagaatacccaggaagtgtttgcccaagtcaaacaaatttataagacaccaccaattaaagattttggtggatttaatttcagccaaatacttccagatccctcacgcagacgacggtctttcatcgaggaccttctgttcaacaaagttactctggctgatgcaggcttcattaagcagtacggtgattgtcttggagacatcgctgcgcgcgacctcatatgcgcccagaaatttaatgggctgaccgtacttccccctttgctgactgatgagatgattgcacaatacacttccgcactccttgcgggtactatcacatccgggtggacttttggagctggcgccgctcttcaaattcccttcgccatgcaaatggcgtacaggtttaatggcatcggtgtgacacagaatgtgctctatgagaaccagaaacttatcgcaaaccagttcaattcagccatcgggaaaatccaagatagtctcagtagtactgcctcagctctcggcaagctccaggatgtagtgaatcagaatgcacaagccttgaacactctcgttaaacaactttcttccaactttggtgccatcagcagtgggcctaacgatatattgagccgcttgcccaaagtggaagcggaagtccaaatagatagacttattaccggccggctgcaatctctgcaaacctatgtgactcaacaattgatccgagctgccgaaatccgtgccagtgcaaatctcgccgcgaccaagatgagcgaatgtgtcttgggacagagcaaaagagtcgatttctgcggaaaaggctaccacctgatgtctttccctcaatctgccccgcacggagtggtctttctccatgtgacttatgtgccagcccaagaaaagaactttacaaccgcaccggcaatttgccatgacggaaaggcgcatttcccccgtgagggagtctttgtgagcaacgggacccattggttcgtgacacaacgcaatttctatgagcctcagatcattaccacggacaatactttcgtgtctggcaactgtgacgtggtcataggcatcgtgaataataccgtctacgatcccttgcaacccgaactggactcattcaaagaagagctggataagtattttaagaaccatacaagccctgatgtcgatcttggggatatatcaggcataaacgcatctgttgtgaatatccaaaaggaaattgatagattgaacgaagttgccaagaacctcaatgaaagtcttatcgacctgcaagaactgggaaaatatgagcaatatataaaatggccatggagcgggcgccggagacggagaaggggtagcggcggtagtggtagcgggtacatcccagaggcacccagagatggacaagcttacgtaaggaaggacggggaatgggtgctgctcagtacatttcttggatgataa

SEQ ID NO: 129 - RNA, 3840 nt, Artificial Sequence
  Description of Artificial Sequence: Synthetic polynucleotide
ggauccgccaccauggauuggacauggauauuguucuugguugcagcagcuacccggguacauuccauguucgucuuccucguacugcucccacuugucaguagucaaugugugaacuugacuacccggacgcaguugcccccggccuacacuaauagcuuuacgcguggagucuauuaccccgacaagguguucaggucauccguccugcauagcacucaagaucucuucuugcccuucuuuaguaacgucacuugguuccaugcaauccacguaaguggcacuaauggcaccaagcgauucgacaaucccguacucccuuuuaacgaugggguguauuucgcgagcacagagaaguccaacaucauccgugguuggaucuucggcaccacacuggauucuaaaacccaaagccugcuuauaguaaauaaugcaacaaacguggucauuaaaguuugcgaauuucaguuuuguaacgaccccuuccuuggcguauauuaccacaagaacaauaaauccuggauggagagcgaauuuaggguuuacaguucagccaauaauuguacauucgaauacguaagccaacccuucuugauggaccuggaaggaaagcaaggaaauuucaagaaucuccgugaauucguguucaagaacauagacggcuauuuuaaaauauauucaaaacacacaccgauuaaccugguacgagaucuuccgcaaggauucucugcacuggaaccgcuggucgaucuuccuaucggcauuaauaucacucgguuucaaacauugcuugcuuugcaucggaguuaucuuacacccggggauagcucaaguggauggacugccggggcugcugccuauuacguaggcuaucuccaaccacggacauuccugcugaaauauaacgagaaugggacaaucacagaugcuguugacugcgcuuuggacccuuugagcgaaacaaagugcacacucaaauccuucaccguggaaaagggaaucuaccaaacgucuaauuuucgcguccaaccaaccgagagcaucgucagauucccaaacauuacuaaucuuugccccuuuggcgaagucuucaaugcuacgcgauuugcguccgucuacgcguggaaucggaagcgcauuagcaauugcgucgcagacuauuccgugcucuauaacucugcauccuuuucuaccuuuaaauguuauggagucaacgggacaaagcucaaugaccuuugcuuuacaaaugucuaugcagacucuuuugucauccguggugaugagguacgacagaucgcgccaggacaaaccgggaagaucgccgauuacaacuacaaacugcccgacgauuucaccgggugcguuauugcuuggaacuccaauaaucuugauaguaaaguuggcggcaacuacaacuaccuguaucgacuuuuccguaaaaguaaucucaagccauuugaaagagacaucaacacaacaauuuaucaggcuggaucuaccccaugcaacggcguugaaggauuuaacugcuacuucccucuccaaaguuacgguuuccaaccaacaaacggcguuggcuaucaaccuuauagagucguuguccucucuuuugagcuuaaccaugccccagcgacagugugugggccgaagaaaagcacuaauuugguuaagaauaaauguguuaacuuuaauuuuaauggauugacggggacagggguucugacagagucuaacaagaaauuucugccguuccaacaguuugggcgagauauugcagauaccacggacgccguucgagacccccaaacacuugaaauucucgauauaacucccugcagcuuuggcgguguauccguuaucacgcccgggacaaauaccaguaaccaagucgcaguccuguaucaagacguaaauuguacggaagugcccguugcuauacacgcugaccaacugacucccacauggagagucuauaguacugguucuaauguguuccaaacacgagccgguugccugaucggagccgaacauguuaacaacucauacgaaugugacauaccgauuggcgccggcauuugcgccagcuaucaaacgcagaccaacucaccaagaaggcgucgcaguguagcaagucaaucuauuauagcguauaccaugucuuugggagcagaaaacuccguugcuuacucuaauaauucuauugcuaucccaaccaauuuuacaaucucaguuacuaccgaaauacugccgguaagcaugacuaagacauccguggauugcacuauguacaucuguggggacucaacagaguguaguaauuugcugcuucaauauggcuccuucugcacucaacugaaucgugcucucacgggaauugcuguugagcaagauaagaauacccaggaaguguuugcccaagucaaacaaauuuauaagacaccaccaauuaaagauuuugguggauuuaauuucagccaaauacuuccagaucccucacgcagacgacggucuuucaucgaggaccuucuguucaacaaaguuacucuggcugaugcaggcuucauuaagcaguacggugauugucuuggagacaucgcugcgcgcgaccucauaugcgcccagaaauuuaaugggcugaccguacuucccccuuugcugacugaugagaugauugcacaauacacuuccgcacuccuugcggguacuaucacauccggguggacuuuuggagcuggcgccgcucuucaaauucccuucgccaugcaaauggcguacagguuuaauggcaucggugugacacagaaugugcucuaugagaaccagaaacuuaucgcaaaccaguucaauucagccaucgggaaaauccaagauagucucaguaguacugccucagcucucggcaagcuccaggauguagugaaucagaaugcacaagccuugaacacucucguuaaacaacuuucuuccaacuuuggugccaucagcagugggccuaacgauauauugagccgcuugcccaaaguggaagcggaaguccaaauagauagacuuauuaccggccggcugcaaucucugcaaaccuaugugacucaacaauugauccgagcugccgaaauccgugccagugcaaaucucgccgcgaccaagaugagcgaaugugucuugggacagagcaaaagagucgauuucugcggaaaaggcuaccaccugaugucuuucccucaaucugccccgcacggaguggucuuucuccaugugacuuaugugccagcccaagaaaagaacuuuacaaccgcaccggcaauuugccaugacggaaaggcgcauuucccccgugagggagucuuugugagcaacgggacccauugguucgugacacaacgcaauuucuaugagccucagaucauuaccacggacaauacuuucgugucuggcaacugugacguggucauaggcaucgugaauaauaccgucuacgaucccuugcaacccgaacuggacucauucaaagaagagcuggauaaguauuuuaagaaccauacaagcccugaugucgaucuuggggauauaucaggcauaaacgcaucuguugugaauauccaaaaggaaauugauagauugaacgaaguugccaagaaccucaaugaaagucuuaucgaccugcaagaacugggaaaauaugagcaauauauaaaauggccauggagcgggcgccggagacggagaagggguagcggcgguagugguagcggguacaucccagaggcacccagagauggacaagcuuacguaaggaaggacggggaaugggugcugcucaguacauuucuuggaugauaa

SEQ ID NO: 130 - protein, 1274 aa, Artificial Sequence; identical to SEQ ID NO: 124
  Description of Artificial Sequence: Synthetic polypeptide

SEQ ID NO: 131 - DNA, 3840 bp, Artificial Sequence
  Description of Artificial Sequence: Synthetic polynucleotide
ggatccgccaccatggattggacatggattctgtttctcgttgccgccgctacgcgcgtgcacagcatgttcgttttcctcgtactgttgcctctggtatcatctcaatgtgtgaatcttacgacgaggacgcaactgccaccagcttacaccaactcttttactagaggggtctattaccccgacaaggttttcagatcctcagtgctgcatagtacacaagatttgtttcttcccttcttctccaatgtcacttggtttcacgctatccacgtgtccggcactaatggaacgaagcggtttgataacccggtacttccatttaatgacggggtatactttgcaagcaccgagaaaagtaatatcattcgtgggtggatctttggcactacactcgactccaagacacaatcccttttgatagtaaataatgctacaaatgtggttataaaggtgtgcgagtttcaattctgcaatgaccccttcctcggtgtctattatcacaagaacaataaatcttggatggaaagtgagttcagggtatacagctctgcaaacaactgcacatttgagtatgtgagccaaccgtttcttatggatctggaaggtaagcagggtaactttaagaaccttcgggagttcgtctttaagaatatagatggctattttaaaatctatagtaaacacactcctattaaccttgtgcgcgatctccctcaagggttctctgcattggaaccgcttgttgatttgcctataggaatcaatattacacgatttcaaacactcctcgctctccataggagctaccttaccccaggcgactcaagctctggttggacggcaggagctgcagcatactatgtgggttatcttcagccgcggacattcttgcttaagtataatgagaatggaactatcactgacgctgttgactgtgccctggaccctctttcagaaacaaaatgtactctcaaatcattcaccgtggagaagggaatatatcaaacaagtaactttagggtccaacctaccgagagcatcgtgcgattccctaatattaccaatttgtgtcccttcggtgaagtcttcaacgcgacccgctttgctagcgtctatgcgtggaacaggaagcgaattagcaactgtgttgcagattacagtgtgctgtacaatagtgcgagcttttccacgttcaaatgctatggcgtgaaacctaccaaacttaatgatttgtgcttcactaatgtttatgctgacagcttcgttatccggggtgatgaggtgaggcagattgcccccggtcaaactggcaaaattgccgactacaattacaagctccctgatgattttactggatgtgtcatagcgtggaattccaataatctggactctaaggttggtggtaattataactatctctaccgcctgtttcgtaagagcaatctgaaaccctttgaaagagatatttggactgagatatatcaagctggctcaactccttgcaacggggtcgaaggtttcaattgttactttccacttcaatcatacgggtttcaaccaactaacggtgtaggttatcaaccctatcgggtggttgtcctgagctttgagctgaaccatgccccggctacagtatgcggcccaaagaaatccactaacttggtcaagaacaaatgcgtcaactttaactttaacggactcacggggacaggagtccttaccgaatccaacaagaaattcttgcctttccaacaatttggacgagacattgcggataccacagacgcagtacgcgacccacagactcttgaaatcctcgacataacaccctgcagtttcggcggtgtaagtgtcattaccccaggcactaatacgagcaaccaagtggcggtgctctaccaagacgttaattgcactgaggtcccagtggctattcacgctgaccaacttacacccacatggagagtgtatagtacaggctcaaacgtcttccagacacgggcggggtgccttattggagcagaacatgttaacaattcctatgaatgcgatatcccgattggagccgggatctgtgctagctatcaaacccaaacaaatagccccagacgtcgacgttccgtggctagtcaaagcatcatcgcctacactatgagtcttggggccgaaaattccgttgcttacagtaacaacagtatcgctatccccaccaattttactattagtgtaactacagagattctgccggtttccatgacaaagacttccgtggattgtacgatgtatatttgcggcgacagcacagagtgcagcaatctgctgctgcaatacggtagtttctgcacccaattgaaccgtgctctgacgggaattgcagttgagcaggacaagaatactcaagaagtatttgcacaagtcaaacagatatacaagacgcccccgattaaagatttcggcgggtttaactttagccaaattcttccggaccccagcagacgccgccgaagctttattgaggacctgctgtttaataaagttacccttgctgatgctggttttatcaagcaatacggagattgcctgggagatatcgccgccagggatttgatctgtgcgcaaaagtttaacggccttaccgttctcccgccccttctgaccgatgaaatgatagcccaatacacttccgcactcctggcaggcacaattacttccggctggacgtttggggccggggcagccttgcaaattccgtttgctatgcaaatggcatatcgtttcaatggtatcggcgtaacacaaaatgtcctttatgagaaccagaaactcattgctaatcagtttaattccgctatcggcaagattcaagacagtctcagcagcacggcgagcgcacttggtaaacttcaagacgttgtcaaccagaatgctcaagccctgaacactctggtaaaacaacttagctctaatttcggtgcaattagctccggtccgaacgatattctgtcacggctcccgaaagtcgaagccgaagtccagatcgataggctgatcacagggcgcttgcagagtctccaaacctacgtgacgcaacaactcattcgggcggctgaaattcgtgcaagcgctaatctggccgctaccaaaatgagtgagtgtgttctcggtcaatcaaagagggttgacttttgcggcaaaggatatcatttgatgagttttccgcaatctgcccctcatggggtagtatttctgcacgtaacttatgtaccagcacaagaaaagaacttcaccacggccccagcaatatgccacgatggcaaagctcatttccctcgcgaaggggtctttgtaagcaatggaacccactggtttgtcacacaacgcaacttttatgagcctcaaatcattacaaccgataacacttttgtctccgggaactgcgacgtggtgattggaatcgtcaacaacactgtctatgatcccctgcaacctgaactggattcctttaaagaagagcttgataagtatttcaagaaccataccagccccgacgtcgatttgggagatattagtgggattaatgctagcgttgttaatatacaaaaggaaatagatcgattgaatgaagtggccaagaatctgaatgagtctctgattgacctgcaggagctcggaaagtatgagcaatatataaaatggccctggtcaggccgcaggcgtcggcggcgcggtagcggcggttcaggatctgggtatatacctgaggccccacgagatgggcaggcttatgtacggaaagatggagaatgggtgttgctgagtactttcctcgggtaataa

SEQ ID NO: 132 - RNA, 3840 nt, Artificial Sequence
  Description of Artificial Sequence: Synthetic polynucleotide
ggauccgccaccauggauuggacauggauucuguuucucguugccgccgcuacgcgcgugcacagcauguucguuuuccucguacuguugccucugguaucaucucaaugugugaaucuuacgacgaggacgcaacugccaccagcuuacaccaacucuuuuacuagaggggucuauuaccccgacaagguuuucagauccucagugcugcauaguacacaagauuuguuucuucccuucuucuccaaugucacuugguuucacgcuauccacguguccggcacuaauggaacgaagcgguuugauaacccgguacuuccauuuaaugacgggguauacuuugcaagcaccgagaaaaguaauaucauucguggguggaucuuuggcacuacacucgacuccaagacacaaucccuuuugauaguaaauaaugcuacaaaugugguuauaaaggugugcgaguuucaauucugcaaugaccccuuccucggugucuauuaucacaagaacaauaaaucuuggauggaaagugaguucaggguauacagcucugcaaacaacugcacauuugaguaugugagccaaccguuucuuauggaucuggaagguaagcaggguaacuuuaagaaccuucgggaguucgucuuuaagaauauagauggcuauuuuaaaaucuauaguaaacacacuccuauuaaccuugugcgcgaucucccucaaggguucucugcauuggaaccgcuuguugauuugccuauaggaaucaauauuacacgauuucaaacacuccucgcucuccauaggagcuaccuuaccccaggcgacucaagcucugguuggacggcaggagcugcagcauacuauguggguuaucuucagccgcggacauucuugcuuaaguauaaugagaauggaacuaucacugacgcuguugacugugcccuggacccucuuucagaaacaaaauguacucucaaaucauucaccguggagaagggaauauaucaaacaaguaacuuuaggguccaaccuaccgagagcaucgugcgauucccuaauauuaccaauuugugucccuucggugaagucuucaacgcgacccgcuuugcuagcgucuaugcguggaacaggaagcgaauuagcaacuguguugcagauuacagugugcuguacaauagugcgagcuuuuccacguucaaaugcuauggcgugaaaccuaccaaacuuaaugauuugugcuucacuaauguuuaugcugacagcuucguuauccggggugaugaggugaggcagauugcccccggucaaacuggcaaaauugccgacuacaauuacaagcucccugaugauuuuacuggaugugucauagcguggaauuccaauaaucuggacucuaagguuggugguaauuauaacuaucucuaccgccuguuucguaagagcaaucugaaacccuuugaaagagauauuuggacugagauauaucaagcuggcucaacuccuugcaacggggucgaagguuucaauuguuacuuuccacuucaaucauacggguuucaaccaacuaacgguguagguuaucaacccuaucgggugguuguccugagcuuugagcugaaccaugccccggcuacaguaugcggcccaaagaaauccacuaacuuggucaagaacaaaugcgucaacuuuaacuuuaacggacucacggggacaggaguccuuaccgaauccaacaagaaauucuugccuuuccaacaauuuggacgagacauugcggauaccacagacgcaguacgcgacccacagacucuugaaauccucgacauaacacccugcaguuucggcgguguaagugucauuaccccaggcacuaauacgagcaaccaaguggcggugcucuaccaagacguuaauugcacugaggucccaguggcuauucacgcugaccaacuuacacccacauggagaguguauaguacaggcucaaacgucuuccagacacgggcggggugccuuauuggagcagaacauguuaacaauuccuaugaaugcgauaucccgauuggagccgggaucugugcuagcuaucaaacccaaacaaauagccccagacgucgacguuccguggcuagucaaagcaucaucgccuacacuaugagucuuggggccgaaaauuccguugcuuacaguaacaacaguaucgcuauccccaccaauuuuacuauuaguguaacuacagagauucugccgguuuccaugacaaagacuuccguggauuguacgauguauauuugcggcgacagcacagagugcagcaaucugcugcugcaauacgguaguuucugcacccaauugaaccgugcucugacgggaauugcaguugagcaggacaagaauacucaagaaguauuugcacaagucaaacagauauacaagacgcccccgauuaaagauuucggcggguuuaacuuuagccaaauucuuccggaccccagcagacgccgccgaagcuuuauugaggaccugcuguuuaauaaaguuacccuugcugaugcugguuuuaucaagcaauacggagauugccugggagauaucgccgccagggauuugaucugugcgcaaaaguuuaacggccuuaccguucucccgccccuucugaccgaugaaaugauagcccaauacacuuccgcacuccuggcaggcacaauuacuuccggcuggacguuuggggccggggcagccuugcaaauuccguuugcuaugcaaauggcauaucguuucaaugguaucggcguaacacaaaauguccuuuaugagaaccagaaacucauugcuaaucaguuuaauuccgcuaucggcaagauucaagacagucucagcagcacggcgagcgcacuugguaaacuucaagacguugucaaccagaaugcucaagcccugaacacucugguaaaacaacuuagcucuaauuucggugcaauuagcuccgguccgaacgauauucugucacggcucccgaaagucgaagccgaaguccagaucgauaggcugaucacagggcgcuugcagagucuccaaaccuacgugacgcaacaacucauucgggcggcugaaauucgugcaagcgcuaaucuggccgcuaccaaaaugagugaguguguucucggucaaucaaagaggguugacuuuugcggcaaaggauaucauuugaugaguuuuccgcaaucugccccucaugggguaguauuucugcacguaacuuauguaccagcacaagaaaagaacuucaccacggccccagcaauaugccacgauggcaaagcucauuucccucgcgaaggggucuuuguaagcaauggaacccacugguuugucacacaacgcaacuuuuaugagccucaaaucauuacaaccgauaacacuuuugucuccgggaacugcgacguggugauuggaaucgucaacaacacugucuaugauccccugcaaccugaacuggauuccuuuaaagaagagcuugauaaguauuucaagaaccauaccagccccgacgucgauuugggagauauuagugggauuaaugcuagcguuguuaauauacaaaaggaaauagaucgauugaaugaaguggccaagaaucugaaugagucucugauugaccugcaggagcucggaaaguaugagcaauauauaaaauggcccuggucaggccgcaggcgucggcggcgcgguagcggcgguucaggaucuggguauauaccugaggccccacgagaugggcaggcuuauguacggaaagauggagaauggguguugcugaguacuuuccucggguaauaa

SEQ ID NO: 133 - protein, 1274 aa, Artificial Sequence
  Description of Artificial Sequence: Synthetic polypeptide
MDWTWILFLVAAATRVHSMFVFLVLLPLVSSQCVNLTTRTQLPPAYTNSFTRGVYYPDKVFRSSVLHSTQDLFLPFFSNVTWFHAIHVSGTNGTKRFDNPVLPFNDGVYFASTEKSNIIRGWIFGTTLDSKTQSLLIVNNATNVVIKVCEFQFCNDPFLGVYYHKNNKSWMESEFRVYSSANNCTFEYVSQPFLMDLEGKQGNFKNLREFVFKNIDGYFKIYSKHTPINLVRDLPQGFSALEPLVDLPIGINITRFQTLLALHRSYLTPGDSSSGWTAGAAAYYVGYLQPRTFLLKYNENGTITDAVDCALDPLSETKCTLKSFTVEKGIYQTSNFRVQPTESIVRFPNITNLCPFGEVFNATRFASVYAWNRKRISNCVADYSVLYNSASFSTFKCYGVKPTKLNDLCFTNVYADSFVIRGDEVRQIAPGQTGKIADYNYKLPDDFTGCVIAWNSNNLDSKVGGNYNYLYRLFRKSNLKPFERDIWTEIYQAGSTPCNGVEGFNCYFPLQSYGFQPTNGVGYQPYRVVVLSFELNHAPATVCGPKKSTNLVKNKCVNFNFNGLTGTGVLTESNKKFLPFQQFGRDIADTTDAVRDPQTLEILDITPCSFGGVSVITPGTNTSNQVAVLYQDVNCTEVPVAIHADQLTPTWRVYSTGSNVFQTRAGCLIGAEHVNNSYECDIPIGAGICASYQTQTNSPRRRRSVASQSIIAYTMSLGAENSVAYSNNSIAIPTNFTISVTTEILPVSMTKTSVDCTMYICGDSTECSNLLLQYGSFCTQLNRALTGIAVEQDKNTQEVFAQVKQIYKTPPIKDFGGFNFSQILPDPSRRRRSFIEDLLFNKVTLADAGFIKQYGDCLGDIAARDLICAQKFNGLTVLPPLLTDEMIAQYTSALLAGTITSGWTFGAGAALQIPFAMQMAYRFNGIGVTQNVLYENQKLIANQFNSAIGKIQDSLSSTASALGKLQDVVNQNAQALNTLVKQLSSNFGAISSGPNDILSRLPKVEAEVQIDRLITGRLQSLQTYVTQQLIRAAEIRASANLAATKMSECVLGQSKRVDFCGKGYHLMSFPQSAPHGVVFLHVTYVPAQEKNFTTAPAICHDGKAHFPREGVFVSNGTHWFVTQRNFYEPQIITTDNTFVSGNCDVVIGIVNNTVYDPLQPELDSFKEELDKYFKNHTSPDVDLGDISGINASVVNIQKEIDRLNEVAKNLNESLIDLQELGKYEQYIKWPWSGRRRRRRGSGGSGSGYIPEAPRDGQAYVRKDGEWVLLSTFLG

SEQ ID NO: 134 - DNA, 3840 bp, Artificial Sequence
  Description of Artificial Sequence: Synthetic polynucleotide
ggatccgccaccatggactggacctggatactctttctcgtagcagcagccacacgagtgcattcaatgtttgtcttcttggtcctcttgccactggttagctcccagtgtgtgaatcttactacaaggacacaactgcccccagcttacacaaactcctttactaggggtgtatattacccagacaaagtgtttcgcagttctgtcctgcatagcacccaagaccttttccttccgttcttcagcaacgtcacctggttccatgctatccatgtcagtggaacgaatggcacaaagcggttcgataaccctgtcctgccctttaacgacggcgtctatttcgcttcaacagagaagagtaacattatcagaggatggatatttggtacaactcttgatagcaagacacaaagcctgctgattgtaaacaacgcgacaaatgtcgtcatcaaggtttgcgagtttcaattttgcaacgatcccttcttgggcgtgtactatcataagaacaataaaagctggatggagagcgaatttagggtgtatagctcagctaataactgtacatttgaatatgtctctcaacccttcctcatggaccttgagggaaagcaaggaaatttcaagaatctcagagaatttgtcttcaagaacatcgacgggtatttcaagatctactccaagcatacacccatcaacttggttagggaccttccgcaaggtttctcagcactggagcctctggtagatctccctattgggattaatattacaagatttcaaacactcctggccttgcatagatcctatcttacccctggggattccagctcaggttggaccgcgggtgccgcggcgtactatgtcggatatctccaacctcggacattcctgctgaaatacaatgaaaatgggaccatcactgatgccgttgattgtgctctcgatcctctgagtgagaccaaatgcactcttaagagttttacagtggagaaaggtatctatcaaactagtaatttcagagttcaaccaaccgagtcaatagtgcgttttccaaatatcactaatctgtgtccatttggggaagtcttcaatgctacccgattcgcaagtgtgtacgcctggaaccggaaacggatttctaactgcgttgccgattatagtgtcctctataattctgcttctttctctacttttaagtgctatggggtgtcccccaccaagctgaacgatctgtgtttcactaacgtctacgccgatagttttgtcattagaggggacgaggtacggcaaatcgcgcccggccaaacggggaaaattgccgattacaactacaagcttccagacgacttcacaggttgcgtgattgcatggaattctaataatctggacagtaaagtgggcggcaactataactatctttaccggctgtttcggaagagcaacttgaagcccttcgaacgcgacatatccaccgagatctatcaagccggaagtaccccgtgcaacggggtagaaggatttaattgttattttccattgcagtcttatggatttcagcccaccaatggtgtgggataccaaccttatagggttgttgttctctccttcgaactcctgcacgctccagctactgtatgtgggcctaagaaaagtactaatctcgttaagaataaatgcgtcaatttcaatttcaacggcttgaccgggactggagtgctcaccgaaagcaacaagaagtttctcccgtttcagcaattcggtagggatattgccgatacgacagatgcagtacgagatccccaaacactcgaaatcctggacattacgccatgtagctttggcggagtaagtgtcatcaccccagggactaacaccagtaaccaagttgcggtactctatcaggatgtgaactgcactgaggtacctgtagcaattcacgcagaccaattgacgccgacgtggcgcgtctatagtacaggaagtaacgtctttcagacaagagcgggttgtttgattggcgctgaacacgttaacaattcttacgagtgtgatatccccatcggtgcggggatctgcgccagctatcagacacaaaccaattccccacgaaggagacgttccgtggccagccagtcaataatcgcgtatactatgtctctgggtgcggagaattcagtggcctattccaataattctatagccattccaaccaattttactataagcgtcactacagagatcttgccagttagcatgacgaaaaccagcgtcgattgtaccatgtatatatgcggcgacagtaccgaatgctcaaatctgctgctccaatatggctcattttgcactcaacttaatagagctctgacagggatcgctgtcgaacaagataagaacactcaggaagttttcgcccaagttaagcagatatacaagaccccgcccatcaaggattttggcggatttaatttctctcagatcctgccggaccctagccgccgacgccggagctttatcgaagacttgctgtttaataaggttactctcgcagatgcaggcttcatcaagcaatacggtgactgccttggggatatcgctgctcgggacctgatctgtgctcagaaattcaacggtctcacggtgctgcccccactcctgaccgacgaaatgattgcccagtatacgtccgcattgctcgctggcaccatcactagcggctggacctttggggccggagccgcgctccaaataccttttgctatgcaaatggcttatcgcttcaatggtattggggttacgcaaaatgtcctctacgaaaatcaaaagctcatagctaaccaattcaatagcgctatagggaaaattcaagacagcctgagttccacagcaagcgccctcggcaaacttcaagatgtagtgaaccaaaatgctcaagcactcaatacactggtcaaacaactctcaagcaatttcggggcaatctcatctggtcctaatgacatattgagcaggctccccaaagtggaagcagaagtacaaatcgacaggctgattaccggacgactccaaagcttgcaaacttatgtaacccaacaacttatcagggctgcagaaatccgtgcaagcgctaacctcgccgctacgaagatgtcagaatgtgtacttgggcagtctaagagggttgatttctgtggaaaagggtaccatctgatgagttttccacagagcgctccacatggggtggtgtttctgcatgtaacctatgttcccgctcaagaaaagaattttactactgcccccgcaatttgccatgacgggaaagcccatttcccccgagagggagttttcgtgagtaacggaacgcactggtttgtcactcagagaaatttctacgagccccaaatcattacgaccgataatacattcgtaagcggtaactgcgatgtcgtcattggcatcgttaacaacactgtttatgatccccttcaacccgagcttgactcatttaaagaggaactggataagtactttaagaatcacacctctcccgatgtcgacctgggcgacatctctggaattaatgcctctgtcgtaaacatccaaaaggaaattgaccgactgaatgaggtggcaaagaatcttaatgaatccctgatcgatctgcaggagcttgggaagtatgagcaatacatcaaatggccatggtctggcagacggcgccggagaaggggctctggcggctctggaagcgggtatattccagaggcgcccagggatgggcaagcatatgttcggaaggatggggagtgggtgttgttgtccacgttccttggctagtga

SEQ ID NO: 135 - RNA, 3840 nt, Artificial Sequence
  Description of Artificial Sequence: Synthetic polynucleotide
ggauccgccaccauggacuggaccuggauacucuuucucguagcagcagccacacgagugcauucaauguuugucuucuugguccucuugccacugguuagcucccagugugugaaucuuacuacaaggacacaacugcccccagcuuacacaaacuccuuuacuagggguguauauuacccagacaaaguguuucgcaguucuguccugcauagcacccaagaccuuuuccuuccguucuucagcaacgucaccugguuccaugcuauccaugucaguggaacgaauggcacaaagcgguucgauaacccuguccugcccuuuaacgacggcgucuauuucgcuucaacagagaagaguaacauuaucagaggauggauauuugguacaacucuugauagcaagacacaaagccugcugauuguaaacaacgcgacaaaugucgucaucaagguuugcgaguuucaauuuugcaacgaucccuucuugggcguguacuaucauaagaacaauaaaagcuggauggagagcgaauuuaggguguauagcucagcuaauaacuguacauuugaauaugucucucaacccuuccucauggaccuugagggaaagcaaggaaauuucaagaaucucagagaauuugucuucaagaacaucgacggguauuucaagaucuacuccaagcauacacccaucaacuugguuagggaccuuccgcaagguuucucagcacuggagccucugguagaucucccuauugggauuaauauuacaagauuucaaacacuccuggccuugcauagauccuaucuuaccccuggggauuccagcucagguuggaccgcgggugccgcggcguacuaugucggauaucuccaaccucggacauuccugcugaaauacaaugaaaaugggaccaucacugaugccguugauugugcucucgauccucugagugagaccaaaugcacucuuaagaguuuuacaguggagaaagguaucuaucaaacuaguaauuucagaguucaaccaaccgagucaauagugcguuuuccaaauaucacuaaucuguguccauuuggggaagucuucaaugcuacccgauucgcaaguguguacgccuggaaccggaaacggauuucuaacugcguugccgauuauaguguccucuauaauucugcuucuuucucuacuuuuaagugcuauggggugucccccaccaagcugaacgaucuguguuucacuaacgucuacgccgauaguuuugucauuagaggggacgagguacggcaaaucgcgcccggccaaacggggaaaauugccgauuacaacuacaagcuuccagacgacuucacagguugcgugauugcauggaauucuaauaaucuggacaguaaagugggcggcaacuauaacuaucuuuaccggcuguuucggaagagcaacuugaagcccuucgaacgcgacauauccaccgagaucuaucaagccggaaguaccccgugcaacgggguagaaggauuuaauuguuauuuuccauugcagucuuauggauuucagcccaccaauggugugggauaccaaccuuauaggguuguuguucucuccuucgaacuccugcacgcuccagcuacuguaugugggccuaagaaaaguacuaaucucguuaagaauaaaugcgucaauuucaauuucaacggcuugaccgggacuggagugcucaccgaaagcaacaagaaguuucucccguuucagcaauucgguagggauauugccgauacgacagaugcaguacgagauccccaaacacucgaaauccuggacauuacgccauguagcuuuggcggaguaagugucaucaccccagggacuaacaccaguaaccaaguugcgguacucuaucaggaugugaacugcacugagguaccuguagcaauucacgcagaccaauugacgccgacguggcgcgucuauaguacaggaaguaacgucuuucagacaagagcggguuguuugauuggcgcugaacacguuaacaauucuuacgagugugauauccccaucggugcggggaucugcgccagcuaucagacacaaaccaauuccccacgaaggagacguuccguggccagccagucaauaaucgcguauacuaugucucugggugcggagaauucaguggccuauuccaauaauucuauagccauuccaaccaauuuuacuauaagcgucacuacagagaucuugccaguuagcaugacgaaaaccagcgucgauuguaccauguauauaugcggcgacaguaccgaaugcucaaaucugcugcuccaauauggcucauuuugcacucaacuuaauagagcucugacagggaucgcugucgaacaagauaagaacacucaggaaguuuucgcccaaguuaagcagauauacaagaccccgcccaucaaggauuuuggcggauuuaauuucucucagauccugccggacccuagccgccgacgccggagcuuuaucgaagacuugcuguuuaauaagguuacucucgcagaugcaggcuucaucaagcaauacggugacugccuuggggauaucgcugcucgggaccugaucugugcucagaaauucaacggucucacggugcugcccccacuccugaccgacgaaaugauugcccaguauacguccgcauugcucgcuggcaccaucacuagcggcuggaccuuuggggccggagccgcgcuccaaauaccuuuugcuaugcaaauggcuuaucgcuucaaugguauugggguuacgcaaaauguccucuacgaaaaucaaaagcucauagcuaaccaauucaauagcgcuauagggaaaauucaagacagccugaguuccacagcaagcgcccucggcaaacuucaagauguagugaaccaaaaugcucaagcacucaauacacuggucaaacaacucucaagcaauuucggggcaaucucaucugguccuaaugacauauugagcaggcuccccaaaguggaagcagaaguacaaaucgacaggcugauuaccggacgacuccaaagcuugcaaacuuauguaacccaacaacuuaucagggcugcagaaauccgugcaagcgcuaaccucgccgcuacgaagaugucagaauguguacuugggcagucuaagaggguugauuucuguggaaaaggguaccaucugaugaguuuuccacagagcgcuccacauggggugguguuucugcauguaaccuauguucccgcucaagaaaagaauuuuacuacugcccccgcaauuugccaugacgggaaagcccauuucccccgagagggaguuuucgugaguaacggaacgcacugguuugucacucagagaaauuucuacgagccccaaaucauuacgaccgauaauacauucguaagcgguaacugcgaugucgucauuggcaucguuaacaacacuguuuaugauccccuucaacccgagcuugacucauuuaaagaggaacuggauaaguacuuuaagaaucacaccucucccgaugucgaccugggcgacaucucuggaauuaaugccucugucguaaacauccaaaaggaaauugaccgacugaaugagguggcaaagaaucuuaaugaaucccugaucgaucugcaggagcuugggaaguaugagcaauacaucaaauggccauggucuggcagacggcgccggagaaggggcucuggcggcucuggaagcggguauauuccagaggcgcccagggaugggcaagcauauguucggaaggauggggaguggguguuguuguccacguuccuuggcuaguga

SEQ ID NO: 136 - protein, 1274 aa, Artificial Sequence
  Description of Artificial Sequence: Synthetic polypeptide
MDWTWILFLVAAATRVHSMFVFLVLLPLVSSQCVNLTTRTQLPPAYTNSFTRGVYYPDKVFRSSVLHSTQDLFLPFFSNVTWFHAIHVSGTNGTKRFDNPVLPFNDGVYFASTEKSNIIRGWIFGTTLDSKTQSLLIVNNATNVVIKVCEFQFCNDPFLGVYYHKNNKSWMESEFRVYSSANNCTFEYVSQPFLMDLEGKQGNFKNLREFVFKNIDGYFKIYSKHTPINLVRDLPQGFSALEPLVDLPIGINITRFQTLLALHRSYLTPGDSSSGWTAGAAAYYVGYLQPRTFLLKYNENGTITDAVDCALDPLSETKCTLKSFTVEKGIYQTSNFRVQPTESIVRFPNITNLCPFGEVFNATRFASVYAWNRKRISNCVADYSVLYNSASFSTFKCYGVSPTKLNDLCFTNVYADSFVIRGDEVRQIAPGQTGKIADYNYKLPDDFTGCVIAWNSNNLDSKVGGNYNYLYRLFRKSNLKPFERDISTEIYQAGSTPCNGVEGFNCYFPLQSYGFQPTNGVGYQPYRVVVLSFELLHAPATVCGPKKSTNLVKNKCVNFNFNGLTGTGVLTESNKKFLPFQQFGRDIADTTDAVRDPQTLEILDITPCSFGGVSVITPGTNTSNQVAVLYQDVNCTEVPVAIHADQLTPTWRVYSTGSNVFQTRAGCLIGAEHVNNSYECDIPIGAGICASYQTQTNSPRRRRSVASQSIIAYTMSLGAENSVAYSNNSIAIPTNFTISVTTEILPVSMTKTSVDCTMYICGDSTECSNLLLQYGSFCTQLNRALTGIAVEQDKNTQEVFAQVKQIYKTPPIKDFGGFNFSQILPDPSRRRRSFIEDLLFNKVTLADAGFIKQYGDCLGDIAARDLICAQKFNGLTVLPPLLTDEMIAQYTSALLAGTITSGWTFGAGAALQIPFAMQMAYRFNGIGVTQNVLYENQKLIANQFNSAIGKIQDSLSSTASALGKLQDVVNQNAQALNTLVKQLSSNFGAISSGPNDILSRLPKVEAEVQIDRLITGRLQSLQTYVTQQLIRAAEIRASANLAATKMSECVLGQSKRVDFCGKGYHLMSFPQSAPHGVVFLHVTYVPAQEKNFTTAPAICHDGKAHFPREGVFVSNGTHWFVTQRNFYEPQIITTDNTFVSGNCDVVIGIVNNTVYDPLQPELDSFKEELDKYFKNHTSPDVDLGDISGINASVVNIQKEIDRLNEVAKNLNESLIDLQELGKYEQYIKWPWSGRRRRRRGSGGSGSGYIPEAPRDGQAYVRKDGEWVLLSTFLG

SEQ ID NO: 137 - DNA, 3840 bp, Artificial Sequence
  Description of Artificial Sequence: Synthetic polynucleotide
ggatccgccaccatggactggacatggattttgtttcttgtggcggctgcaacgcgagttcattccatgtttgttttcctggttctcttgccgctcgtctctagtcaatgcgtcaatctgacgacaagaacgcaacttccccctgcctacaccaatagttttacccgtggcgtctattatccagataaagtgtttcgaagttcctgccttcattccacgcaagatctcttccttccattcttctctaatgtcacctggtttcatgcgatccacgtgtctggaaccaacgggactaaacgattcgacaatcccgtcctgccatttaacgatggagtatacttcgcatccaccgagaaatctggcattataagagggtggatattcgggactacactcgacagcaagacacaaagtctcctgattgttaacaacgcgacaaacgtcgtaattaaagtttgcgaatttcaattttgtaatgacccgttcttgggcgtgtattatcacaagaataacaaaagttggatggaatccgaattccgggtttattccagcgcgaataattgcacatttgaatacgttagccaacctttcctgatggatctcgaaggcaaacaaggaaactttaagaatcttcgggaattcgttttcaagaacatcgacgggtactttaagatatactcaaaacacaccccaattaatttggtccgagatctgccgcaaggctttagtgcgcttgagcccctcgtagatctcccaattggtattaatatcacacgctttcaaaccctgctggcattgcatcggagctatctgactcccggcgatagttcttcagggtggacggcgggtgccgctgcttactatgtaggctatctgcagcctcgtacatttctcctcaaatacaatgaaaatggcactattaccgacgccgttgattgcgctctggacccactgagcgagactaaatgcaccctcaaatcattcactgttgagaagggaatttaccaaacatcaaacttcagggtccaacctacggaaagcatcgtgcggttccccaacatcactaacctctgcccctttggagaagtatttaacgctacaaggttcgcttccgtctacgcctggaacaggaaaagaatcagtaattgcgtggctgattactccgtgctgtacaattccgcctcattttctacatttaagtgttatggcgttaacgggactaagcttaacgacctctgcttcacaaacgtctatgccgacagctttgtcattcgcggggatgaagtaagacagatagcacccggtcaaactggcaaaattgctgattacaattacaagttgccagatgatttcactggatgcgttatagcatggaactctaacaaccttgactcaaaggttggtggcaactataattatttgtatcgcctgtttcgcaaatctaatctcaagcctttcgagcgcgacataaatacgaccatataccaagcggggtccaccccttgtaatggagtcgaggggtttaattgctattttccgttgcaatcctacgggttccaaccaacaaacggcgtcggctatcaaccctatcgggttgtcgtactctcattcgagctcaaccatgcaccagcaacagtttgtggccccaagaagagcacaaatttggtcaagaataaatgcgttaattttaatttcaatggtctgactggcacaggggttcttaccgaatcaaataagaagtttctgccatttcagcagttcggaagggactgtgcagggaccacagatgccgttagagacccccaaacactcgaaattctggacatcacgccatgcagtttcggtggtgttagcgtgattactccgggtactaatacgtccaaccaagtggctgtgttgtatcaagacgttaactgtaccgaagttcctgtagcaatccatgccggtcaactgacccccacgtggcgagtttatagcaccggttccaacgtctttcaaacaagagccggatgtctcataggcgctgaacatgtgaataattcatacgaatgtgacattccaatcggcgcagggatttgcgcctcatatcagacacaaactaactccccgagaagacgtcgctcagtggcgtcacaaagcatcatcgcttatacgatgagcctctgcgccgagaactctgtcgcatattctaacaactctattgcaattcctacaaattttacaatttcttgcactactgagatcctgcccgtaagcatgacgaaaacatcctgcgactgcacaatgtatatctgtggcgactcaactgagtgctccaatctcctcttgcaatacggatctttctgtactcaactcaacagagcacttacaggaatagccgtcgaacaagacaagaacacacaagaggtcttcgcccaagtaaagcaatgttacaaaaccccacctattaaagactttggtgggtttaatttctcacagattcttccagatccttcccgtagaaggagaagctttattgaagacctcttgtttaataaagtcactcttgcagacgctgggtttattaaacaatatggagactgcttgggagacatagcggcaagagacctgatctgcgctcaaaagtttaatgggtgcactgtgttgccaccccttctgaccgacgagatgatcgctcagtataccagtgccttgctggcagggaccataactagcggatggactttcggtgcaggagctgctctgcaaatcccttttgcgatgcaaatggcctacaggtttaatggtataggagttactcagaatgtcctgtacgaaaatcaaaagctgatcgccaatcaattcaacagtgctattgggaaaatacaggacagtttgagttcaacagcgagcgctctcggcaaactgcaggatgttgtgaatcaaaacgcgcaagctttgaacactcttgtgaagcagctttcatccaacttcggagcgatctcatccgtcctgaacgacatattgtcaagacttgacccacctgaagcggaagttcagatagaccgactcataacgggccgacttcagtccttgcagacatacgtgacccaacaacttatccgcgcagccgaaataagggcttcagctaaccttgcagcaaccaaaatgtcagagtgcgtgctcggtcaaagcaagcgggtagacttttgtggcaaggggtatcatcttatgtcctttcctcaatccgcccctcacggggtggtcttcttgcactgcacttatgtacctgctcaagagaagaattttacgaccgcccctgcgatctgtcacgacgggaaagcacatttcccccgcgagggagtctttgtgtctaatggtactcattggtttgttacgcagcggaacttttacgaacctcaaataattacaacggataatacagatgttagtgggaattgcgacgtggtgatcggtatagtcaacaatacggtgtatgatccacttcaaccagaacttgattcctttaaggaagagctggacaaatatttcaagaaccatacatcccctgacgtggaccttggcgatataagcggcattaatgcttcagtggtcaatatacaaaaggaaatcgatcgcctgaatgaggtcgcaaagaatttgaatgagtccctgatcgacctgcaagagctcgggaaatatgagcagtacatcaagtggccctggtcaggtagacgtaggcggcgccggggcagtggcggctcagggagcggttatatacccgaagcccctagagatgggcaagcttatgtccgaaaggacggcgaatgggtgctcctttccactttcttgggataatag

SEQ ID NO: 138 - RNA, 3840 nt, Artificial Sequence
  Description of Artificial Sequence: Synthetic polynucleotide
ggauccgccaccauggacuggacauggauuuuguuucuuguggcggcugcaacgcgaguucauuccauguuuguuuuccugguucucuugccgcucgucucuagucaaugcgucaaucugacgacaagaacgcaacuucccccugccuacaccaauaguuuuacccguggcgucuauuauccagauaaaguguuucgaaguuccugccuucauuccacgcaagaucucuuccuuccauucuucucuaaugucaccugguuucaugcgauccacgugucuggaaccaacgggacuaaacgauucgacaaucccguccugccauuuaacgauggaguauacuucgcauccaccgagaaaucuggcauuauaagaggguggauauucgggacuacacucgacagcaagacacaaagucuccugauuguuaacaacgcgacaaacgucguaauuaaaguuugcgaauuucaauuuuguaaugacccguucuugggcguguauuaucacaagaauaacaaaaguuggauggaauccgaauuccggguuuauuccagcgcgaauaauugcacauuugaauacguuagccaaccuuuccugauggaucucgaaggcaaacaaggaaacuuuaagaaucuucgggaauucguuuucaagaacaucgacggguacuuuaagauauacucaaaacacaccccaauuaauuugguccgagaucugccgcaaggcuuuagugcgcuugagccccucguagaucucccaauugguauuaauaucacacgcuuucaaacccugcuggcauugcaucggagcuaucugacucccggcgauaguucuucaggguggacggcgggugccgcugcuuacuauguaggcuaucugcagccucguacauuucuccucaaauacaaugaaaauggcacuauuaccgacgccguugauugcgcucuggacccacugagcgagacuaaaugcacccucaaaucauucacuguugagaagggaauuuaccaaacaucaaacuucaggguccaaccuacggaaagcaucgugcgguuccccaacaucacuaaccucugccccuuuggagaaguauuuaacgcuacaagguucgcuuccgucuacgccuggaacaggaaaagaaucaguaauugcguggcugauuacuccgugcuguacaauuccgccucauuuucuacauuuaaguguuauggcguuaacgggacuaagcuuaacgaccucugcuucacaaacgucuaugccgacagcuuugucauucgcggggaugaaguaagacagauagcacccggucaaacuggcaaaauugcugauuacaauuacaaguugccagaugauuucacuggaugcguuauagcauggaacucuaacaaccuugacucaaagguugguggcaacuauaauuauuuguaucgccuguuucgcaaaucuaaucucaagccuuucgagcgcgacauaaauacgaccauauaccaagcgggguccaccccuuguaauggagucgagggguuuaauugcuauuuuccguugcaauccuacggguuccaaccaacaaacggcgucggcuaucaacccuaucggguugucguacucucauucgagcucaaccaugcaccagcaacaguuuguggccccaagaagagcacaaauuuggucaagaauaaaugcguuaauuuuaauuucaauggucugacuggcacagggguucuuaccgaaucaaauaagaaguuucugccauuucagcaguucggaagggacugugcagggaccacagaugccguuagagacccccaaacacucgaaauucuggacaucacgccaugcaguuucggugguguuagcgugauuacuccggguacuaauacguccaaccaaguggcuguguuguaucaagacguuaacuguaccgaaguuccuguagcaauccaugccggucaacugacccccacguggcgaguuuauagcaccgguuccaacgucuuucaaacaagagccggaugucucauaggcgcugaacaugugaauaauucauacgaaugugacauuccaaucggcgcagggauuugcgccucauaucagacacaaacuaacuccccgagaagacgucgcucaguggcgucacaaagcaucaucgcuuauacgaugagccucugcgccgagaacucugucgcauauucuaacaacucuauugcaauuccuacaaauuuuacaauuucuugcacuacugagauccugcccguaagcaugacgaaaacauccugcgacugcacaauguauaucuguggcgacucaacugagugcuccaaucuccucuugcaauacggaucuuucuguacucaacucaacagagcacuuacaggaauagccgucgaacaagacaagaacacacaagaggucuucgcccaaguaaagcaauguuacaaaaccccaccuauuaaagacuuugguggguuuaauuucucacagauucuuccagauccuucccguagaaggagaagcuuuauugaagaccucuuguuuaauaaagucacucuugcagacgcuggguuuauuaaacaauauggagacugcuugggagacauagcggcaagagaccugaucugcgcucaaaaguuuaaugggugcacuguguugccaccccuucugaccgacgagaugaucgcucaguauaccagugccuugcuggcagggaccauaacuagcggauggacuuucggugcaggagcugcucugcaaaucccuuuugcgaugcaaauggccuacagguuuaaugguauaggaguuacucagaauguccuguacgaaaaucaaaagcugaucgccaaucaauucaacagugcuauugggaaaauacaggacaguuugaguucaacagcgagcgcucucggcaaacugcaggauguugugaaucaaaacgcgcaagcuuugaacacucuugugaagcagcuuucauccaacuucggagcgaucucauccguccugaacgacauauugucaagacuugacccaccugaagcggaaguucagauagaccgacucauaacgggccgacuucaguccuugcagacauacgugacccaacaacuuauccgcgcagccgaaauaagggcuucagcuaaccuugcagcaaccaaaaugucagagugcgugcucggucaaagcaagcggguagacuuuuguggcaagggguaucaucuuauguccuuuccucaauccgccccucacgggguggucuucuugcacugcacuuauguaccugcucaagagaagaauuuuacgaccgccccugcgaucugucacgacgggaaagcacauuucccccgcgagggagucuuugugucuaaugguacucauugguuuguuacgcagcggaacuuuuacgaaccucaaauaauuacaacggauaauacagauguuagugggaauugcgacguggugaucgguauagucaacaauacgguguaugauccacuucaaccagaacuugauuccuuuaaggaagagcuggacaaauauuucaagaaccauacauccccugacguggaccuuggcgauauaagcggcauuaaugcuucaguggucaauauacaaaaggaaaucgaucgccugaaugaggucgcaaagaauuugaaugagucccugaucgaccugcaagagcucgggaaauaugagcaguacaucaaguggcccuggucagguagacguaggcggcgccggggcaguggcggcucagggagcgguuauauacccgaagccccuagagaugggcaagcuuauguccgaaaggacggcgaaugggugcuccuuuccacuuucuugggauaauag

SEQ ID NO: 139 - protein, 1274 aa, Artificial Sequence
  Description of Artificial Sequence: Synthetic polypeptide
MDWTWILFLVAAATRVHSMFVFLVLLPLVSSQCVNLTTRTQLPPAYTNSFTRGVYYPDKVFRSSCLHSTQDLFLPFFSNVTWFHAIHVSGTNGTKRFDNPVLPFNDGVYFASTEKSGIIRGWIFGTTLDSKTQSLLIVNNATNVVIKVCEFQFCNDPFLGVYYHKNNKSWMESEFRVYSSANNCTFEYVSQPFLMDLEGKQGNFKNLREFVFKNIDGYFKIYSKHTPINLVRDLPQGFSALEPLVDLPIGINITRFQTLLALHRSYLTPGDSSSGWTAGAAAYYVGYLQPRTFLLKYNENGTITDAVDCALDPLSETKCTLKSFTVEKGIYQTSNFRVQPTESIVRFPNITNLCPFGEVFNATRFASVYAWNRKRISNCVADYSVLYNSASFSTFKCYGVNGTKLNDLCFTNVYADSFVIRGDEVRQIAPGQTGKIADYNYKLPDDFTGCVIAWNSNNLDSKVGGNYNYLYRLFRKSNLKPFERDINTTIYQAGSTPCNGVEGFNCYFPLQSYGFQPTNGVGYQPYRVVVLSFELNHAPATVCGPKKSTNLVKNKCVNFNFNGLTGTGVLTESNKKFLPFQQFGRDCAGTTDAVRDPQTLEILDITPCSFGGVSVITPGTNTSNQVAVLYQDVNCTEVPVAIHAGQLTPTWRVYSTGSNVFQTRAGCLIGAEHVNNSYECDIPIGAGICASYQTQTNSPRRRRSVASQSIIAYTMSLCAENSVAYSNNSIAIPTNFTISCTTEILPVSMTKTSCDCTMYICGDSTECSNLLLQYGSFCTQLNRALTGIAVEQDKNTQEVFAQVKQCYKTPPIKDFGGFNFSQILPDPSRRRRSFIEDLLFNKVTLADAGFIKQYGDCLGDIAARDLICAQKFNGCTVLPPLLTDEMIAQYTSALLAGTITSGWTFGAGAALQIPFAMQMAYRFNGIGVTQNVLYENQKLIANQFNSAIGKIQDSLSSTASALGKLQDVVNQNAQALNTLVKQLSSNFGAISSVLNDILSRLDPPEAEVQIDRLITGRLQSLQTYVTQQLIRAAEIRASANLAATKMSECVLGQSKRVDFCGKGYHLMSFPQSAPHGVVFLHCTYVPAQEKNFTTAPAICHDGKAHFPREGVFVSNGTHWFVTQRNFYEPQIITTDNTDVSGNCDVVIGIVNNTVYDPLQPELDSFKEELDKYFKNHTSPDVDLGDISGINASVVNIQKEIDRLNEVAKNLNESLIDLQELGKYEQYIKWPWSGRRRRRRGSGGSGSGYIPEAPRDGQAYVRKDGEWVLLSTFLG

SEQ ID NO: 140 - DNA, 3840 bp, Artificial Sequence
  Description of Artificial Sequence: Synthetic polynucleotide
ggatccgccaccatggattggacctggatacttttcctcgtggccgcagcaacaagagtccactccatgttcgtcttcttggtacttttgccactcgtcagttctcagtgcgttaacctgactactagaacccaattgcccccggcatacacaaactctttcacccggggtgtctactatcccgacaaagtgtttagaagtagcgtgctgcacagcacccaagatctctttctgccattcttctcaaacgtcacctggtttcacgccatccatgtaagcgggaccaacggcacaaagcgttttgataaccctgttttgccattcaatgatggcgtgtattttgcttccactgagaaaagcaacatcattagagggtggatatttggcacaacgcttgactccaagacgcagagtcttttgatagtaaacaacgcaactaatgtggtcattaaagtctgtgaatttcaattttgcaatgaccccttccttggagtctattaccacaagaacaacaaaagctggatggaaagcgaatttagggtctacagctctgccaataactgcacattcgaatacgtcagccaaccattcttgatggacctggaaggcaagcaaggaaactttaagaatctgagggaatttgtgtttaagaatatcgacggatattttaagatctattccaagcatactcccattaatctcgttcgtgaccttcctcagggtttctctgcattggaacccctcgtagatttgcccattgggattaatatcactagattccagacgctgcttgcactccatcgatcttatctgacccctggtgactcctcttccgggtggacggcgggtgctgcagcctactacgttggctatttgcaacctaggacctttctgttgaagtataatgagaatgggactattactgatgccgttgattgcgccctcgatccgctgtcagaaacaaagtgcaccctgaagagcttcacagtagaaaagggaatctatcaaacctcaaatttccgcgttcaaccaactgaatcaatcgtgcgttttcctaacatcacaaatctgtgtccgtttggagaagtatttaatgcgacgcgtttcgcaagcgtctacgcgtggaatcgcaaacgtatctctaattgcgtagcagattattctgtgctgtacaatagcgcatctttctcaacgtttaagtgctacggcgttaatgggaccaagctgaatgatctctgtttcactaatgtgtacgcagacagttttgtaattagaggagacgaggttaggcaaatagcaccgggtcaaactggcaaaatcgccgactataactacaagctccctgatgacttcacgggctgcgtaattgcttggaactctaataacctggactctaaagtcggcgggaattataattatctctatcggttgtttcgaaaatccaatctcaaaccctttgagcgggacatcaatactacaatttatcaagctggtagtactccttgcaatggggtagaaggcttcaattgttatttcccccttcaatcttacggatttcaacccacgaacggcgtagggtaccagccctatcgagtggtggtactgtcattcgaacttaatcacgccccagcaacagtctgcgggcctaagaaaagcacgaatcttgtcaagaataagtgtgtaaatttcaacttcaatggtcttacaggcacgggagtgctcactgagtctaataagaaatttcttcctttccaacaattcggtcgtgatattgccgatactactgatgcagtccgagatccacaaactctcgaaatcctcgatattactccttgtagttttggcggcgtctccgtgatcaccccagggaccaacactagtaaccaagtggcggtgctctaccaagatgttaactgcacagaagtcccggtagcgatccatgccgaccagctcactcccacatggcgtgtttacagcacagggtcaaacgttttccagacccgtgccggatgtcttataggagccgaacacgtaaataacagttatgaatgcgatatcccaattggtgcaggtatctgtgcgtcatatcaaacccaaactaattctccgagacgacgacggagcgttgcctcacaatcaataatcgcctacacaatgtccctcggtgccgaaaattcagtcgcttactctaacaatagcattgctatccctaccaacttcactatttctgttaccacggaaattttgcctgtatccatgaccaaaacatctgttgattgcacgatgtacatctgcggggattctaccgaatgttctaacctgcttctgcaatacggctccttctgcacccaattgaaccgcgcactgactgggattgctgtggaacaagacaagaatactcaagaagtatttgcccaggtcaaacagatttacaaaactcccccaattaaagatttcggcggtttcaattttagtcaaattctgccagatccaagtcgacgccgcaggagctttattgaggacctgctctttaataaagtcacgctggccgacgccggcttcataaaacagtatggcgattgtcttggagacatcgccgcccgcgacctcatttgcgcacaaaagttcaatgggctcaccgtgttgccaccactgctcacagatgagatgatcgcacagtacacgagcgcccttcttgccggcactatcacgtctggttggacgttcggtgccggagccgctctgcaaattccctttgcaatgcaaatggcctatagatttaatggaattggcgtaacacagaacgtgttgtacgagaaccagaagctcattgccaaccagttcaattccgctattggcaaaatacaagactctctcagctcaactgctagcgcactgggaaaattgcaagacgtagtcaatcaaaatgcccaagccctcaatactctcgtcaaacagttgtcttccaactttggggctatcagtagtgtactcaatgacattctttcaagactggacccgcccgaggcggaagtccaaattgatcgtctgataactggaaggttgcaaagccttcagacctacgttacgcaacaacttattagggctgccgaaataagggcatccgctaatctggcagctacaaagatgtctgaatgtgttttgggacagagcaaacgggttgacttctgcggtaaaggttaccatctcatgtcttttccacaaagcgcaccgcacggagtcgtcttcctgcatgtaacatacgtcccagcccaagaaaagaattttaccacagccccagccatctgccacgacggcaaggcgcatttcccaagggaaggcgtgtttgtatccaacgggacgcattggtttgtcactcaaaggaacttttacgaaccccaaattattaccactgataacaccttcgtttctgggaactgtgatgtcgtgattgggatagtaaacaacacggtatatgatccactgcaaccagaactggattccttcaaagaagagctggacaaatacttcaagaatcatactagtcctgacgtcgacctgggcgatatcagtggaatcaacgctagcgtcgtaaacattcaaaaggagatcgatagacttaacgaggtcgccaagaatctcaatgaaagcctcatcgatttgcaagaactcggaaaatatgagcaatacataaaatggccatggtctggcaggagaagacgcaggagaggtagcggcggcagcggatcagggtacattccggaagcccccagggacggacaggcatatgtccgcaaggacggagaatgggttcttcttagcacttttctggggtaataa

SEQ ID NO: 141 - RNA, 3840 nt, Artificial Sequence
  Description of Artificial Sequence: Synthetic polynucleotide
ggauccgccaccauggauuggaccuggauacuuuuccucguggccgcagcaacaagaguccacuccauguucgucuucuugguacuuuugccacucgucaguucucagugcguuaaccugacuacuagaacccaauugcccccggcauacacaaacucuuucacccggggugucuacuaucccgacaaaguguuuagaaguagcgugcugcacagcacccaagaucucuuucugccauucuucucaaacgucaccugguuucacgccauccauguaagcgggaccaacggcacaaagcguuuugauaacccuguuuugccauucaaugauggcguguauuuugcuuccacugagaaaagcaacaucauuagaggguggauauuuggcacaacgcuugacuccaagacgcagagucuuuugauaguaaacaacgcaacuaauguggucauuaaagucugugaauuucaauuuugcaaugaccccuuccuuggagucuauuaccacaagaacaacaaaagcuggauggaaagcgaauuuagggucuacagcucugccaauaacugcacauucgaauacgucagccaaccauucuugauggaccuggaaggcaagcaaggaaacuuuaagaaucugagggaauuuguguuuaagaauaucgacggauauuuuaagaucuauuccaagcauacucccauuaaucucguucgugaccuuccucaggguuucucugcauuggaaccccucguagauuugcccauugggauuaauaucacuagauuccagacgcugcuugcacuccaucgaucuuaucugaccccuggugacuccucuuccggguggacggcgggugcugcagccuacuacguuggcuauuugcaaccuaggaccuuucuguugaaguauaaugagaaugggacuauuacugaugccguugauugcgcccucgauccgcugucagaaacaaagugcacccugaagagcuucacaguagaaaagggaaucuaucaaaccucaaauuuccgcguucaaccaacugaaucaaucgugcguuuuccuaacaucacaaaucuguguccguuuggagaaguauuuaaugcgacgcguuucgcaagcgucuacgcguggaaucgcaaacguaucucuaauugcguagcagauuauucugugcuguacaauagcgcaucuuucucaacguuuaagugcuacggcguuaaugggaccaagcugaaugaucucuguuucacuaauguguacgcagacaguuuuguaauuagaggagacgagguuaggcaaauagcaccgggucaaacuggcaaaaucgccgacuauaacuacaagcucccugaugacuucacgggcugcguaauugcuuggaacucuaauaaccuggacucuaaagucggcgggaauuauaauuaucucuaucgguuguuucgaaaauccaaucucaaacccuuugagcgggacaucaauacuacaauuuaucaagcugguaguacuccuugcaaugggguagaaggcuucaauuguuauuucccccuucaaucuuacggauuucaacccacgaacggcguaggguaccagcccuaucgaguggugguacugucauucgaacuuaaucacgccccagcaacagucugcgggccuaagaaaagcacgaaucuugucaagaauaaguguguaaauuucaacuucaauggucuuacaggcacgggagugcucacugagucuaauaagaaauuucuuccuuuccaacaauucggucgugauauugccgauacuacugaugcaguccgagauccacaaacucucgaaauccucgauauuacuccuuguaguuuuggcggcgucuccgugaucaccccagggaccaacacuaguaaccaaguggcggugcucuaccaagauguuaacugcacagaagucccgguagcgauccaugccgaccagcucacucccacauggcguguuuacagcacagggucaaacguuuuccagacccgugccggaugucuuauaggagccgaacacguaaauaacaguuaugaaugcgauaucccaauuggugcagguaucugugcgucauaucaaacccaaacuaauucuccgagacgacgacggagcguugccucacaaucaauaaucgccuacacaaugucccucggugccgaaaauucagucgcuuacucuaacaauagcauugcuaucccuaccaacuucacuauuucuguuaccacggaaauuuugccuguauccaugaccaaaacaucuguugauugcacgauguacaucugcggggauucuaccgaauguucuaaccugcuucugcaauacggcuccuucugcacccaauugaaccgcgcacugacugggauugcuguggaacaagacaagaauacucaagaaguauuugcccaggucaaacagauuuacaaaacucccccaauuaaagauuucggcgguuucaauuuuagucaaauucugccagauccaagucgacgccgcaggagcuuuauugaggaccugcucuuuaauaaagucacgcuggccgacgccggcuucauaaaacaguauggcgauugucuuggagacaucgccgcccgcgaccucauuugcgcacaaaaguucaaugggcucaccguguugccaccacugcucacagaugagaugaucgcacaguacacgagcgcccuucuugccggcacuaucacgucugguuggacguucggugccggagccgcucugcaaauucccuuugcaaugcaaauggccuauagauuuaauggaauuggcguaacacagaacguguuguacgagaaccagaagcucauugccaaccaguucaauuccgcuauuggcaaaauacaagacucucucagcucaacugcuagcgcacugggaaaauugcaagacguagucaaucaaaaugcccaagcccucaauacucucgucaaacaguugucuuccaacuuuggggcuaucaguaguguacucaaugacauucuuucaagacuggacccgcccgaggcggaaguccaaauugaucgucugauaacuggaagguugcaaagccuucagaccuacguuacgcaacaacuuauuagggcugccgaaauaagggcauccgcuaaucuggcagcuacaaagaugucugaauguguuuugggacagagcaaacggguugacuucugcgguaaagguuaccaucucaugucuuuuccacaaagcgcaccgcacggagucgucuuccugcauguaacauacgucccagcccaagaaaagaauuuuaccacagccccagccaucugccacgacggcaaggcgcauuucccaagggaaggcguguuuguauccaacgggacgcauugguuugucacucaaaggaacuuuuacgaaccccaaauuauuaccacugauaacaccuucguuucugggaacugugaugucgugauugggauaguaaacaacacgguauaugauccacugcaaccagaacuggauuccuucaaagaagagcuggacaaauacuucaagaaucauacuaguccugacgucgaccugggcgauaucaguggaaucaacgcuagcgucguaaacauucaaaaggagaucgauagacuuaacgaggucgccaagaaucucaaugaaagccucaucgauuugcaagaacucggaaaauaugagcaauacauaaaauggccauggucuggcaggagaagacgcaggagagguagcggcggcagcggaucaggguacauuccggaagcccccagggacggacaggcauauguccgcaaggacggagaauggguucuucuuagcacuuuucugggguaauaa

SEQ ID NO: 142 - protein, 1274 aa, Artificial Sequence
  Description of Artificial Sequence: Synthetic polypeptide
MDWTWILFLVAAATRVHSMFVFLVLLPLVSSQCVNLTTRTQLPPAYTNSFTRGVYYPDKVFRSSVLHSTQDLFLPFFSNVTWFHAIHVSGTNGTKRFDNPVLPFNDGVYFASTEKSNIIRGWIFGTTLDSKTQSLLIVNNATNVVIKVCEFQFCNDPFLGVYYHKNNKSWMESEFRVYSSANNCTFEYVSQPFLMDLEGKQGNFKNLREFVFKNIDGYFKIYSKHTPINLVRDLPQGFSALEPLVDLPIGINITRFQTLLALHRSYLTPGDSSSGWTAGAAAYYVGYLQPRTFLLKYNENGTITDAVDCALDPLSETKCTLKSFTVEKGIYQTSNFRVQPTESIVRFPNITNLCPFGEVFNATRFASVYAWNRKRISNCVADYSVLYNSASFSTFKCYGVNGTKLNDLCFTNVYADSFVIRGDEVRQIAPGQTGKIADYNYKLPDDFTGCVIAWNSNNLDSKVGGNYNYLYRLFRKSNLKPFERDINTTIYQAGSTPCNGVEGFNCYFPLQSYGFQPTNGVGYQPYRVVVLSFELNHAPATVCGPKKSTNLVKNKCVNFNFNGLTGTGVLTESNKKFLPFQQFGRDIADTTDAVRDPQTLEILDITPCSFGGVSVITPGTNTSNQVAVLYQDVNCTEVPVAIHADQLTPTWRVYSTGSNVFQTRAGCLIGAEHVNNSYECDIPIGAGICASYQTQTNSPRRRRSVASQSIIAYTMSLGAENSVAYSNNSIAIPTNFTISVTTEILPVSMTKTSVDCTMYICGDSTECSNLLLQYGSFCTQLNRALTGIAVEQDKNTQEVFAQVKQIYKTPPIKDFGGFNFSQILPDPSRRRRSFIEDLLFNKVTLADAGFIKQYGDCLGDIAARDLICAQKFNGLTVLPPLLTDEMIAQYTSALLAGTITSGWTFGAGAALQIPFAMQMAYRFNGIGVTQNVLYENQKLIANQFNSAIGKIQDSLSSTASALGKLQDVVNQNAQALNTLVKQLSSNFGAISSVLNDILSRLDPPEAEVQIDRLITGRLQSLQTYVTQQLIRAAEIRASANLAATKMSECVLGQSKRVDFCGKGYHLMSFPQSAPHGVVFLHVTYVPAQEKNFTTAPAICHDGKAHFPREGVFVSNGTHWFVTQRNFYEPQIITTDNTFVSGNCDVVIGIVNNTVYDPLQPELDSFKEELDKYFKNHTSPDVDLGDISGINASVVNIQKEIDRLNEVAKNLNESLIDLQELGKYEQYIKWPWSGRRRRRRGSGGSGSGYIPEAPRDGQAYVRKDGEWVLLSTFLG

SEQ ID NO: 143 - DNA, 3822 bp, Artificial Sequence
  Description of Artificial Sequence: Synthetic polynucleotide
ggatccgccaccatggattggacgtggattctgtttctggtggccgcagcgacaagggtgcattcaatgtttgtgttcctggtcctgctgccactggtctcatcacagtgtgtaaacctgactacaagaacgcagcttccgcctgcctacacgaacagcttcaccaggggagtgtattatcctgacaaagtctttaggagctctgttctccactccactcaagacctgtttctgcccttcttcagtaacgtgacttggtttcacgcaatacatgtctccggcacaaatggaaccaaaagattcgataaccctgttctcccattcaatgatggagtatattttgctagcactgaaaagtctaacattattagaggctggatatttggcacgacattggactccaagacgcaaagtctcttgattgtgaacaacgcaacaaacgtggtgataaaagtttgcgaattccaattttgcaatgacccattcctgggagtttactaccacaagaataacaaaagctggatggaatccgagttccgggtttactcctctgctaacaactgtacctttgagtatgtgagtcaaccattccttatggatctcgaaggaaaacaaggtaacttcaagaacctgagggagtttgtgtttaagaatatcgatggctattttaagatttatagcaaacacactccgattaatctggtgagagatctcccgcaaggattttctgctttggagccattggttgacttgcctattggaatcaacatcacccgttttcaaactctgcttgcgctgcatagatcctaccttacgcctggcgattcaagcagtggctggaccgcgggagcggccgcctattatgtaggctacttgcagcctcgcacctttctcctcaagtacaatgaaaacggcacaattacagacgcagtggattgtgctctggaccccctcagtgaaactaaatgtaccctgaaaagcttcactgttgagaaaggcatatatcaaacctcaaactttagagtgcaacctactgaaagcattgtaagattccctaacattacaaacctgtgcccctttggcgaagtctttaatgcaacccggtttgctagcgtgtatgcttggaaccgcaagaggatatccaattgcgtcgcagattattccgtcctgtataactctgccagctttagtaccttcaaatgttatggggtatctcccacaaaactcaatgatctttgtttcacaaatgtctatgctgactcctttgttatcagaggggacgaagttcgccaaattgctccaggtcaaacaggaaagattgcagattataactacaagcttcccgacgattttacaggttgtgtgatagcttggaactccaataatctggattccaaggtaggcgggaactacaattatctctacaggctcttccggaaatccaatctcaagccgttcgaaagggatataagcactgagatctatcaagcaggcagtacaccctgtaacggagtagagggcttcaactgctactttccactgcaatcctatgggtttcaaccgactaacggtgtcgggtaccaaccctatcgtgtcgtggtcctgtcctttgagcttctgcacgctcctgctaccgtttgcggccccaagaaaagcacgaatttggtcaagaacaaatgtgtcaactttaacttcaacggattgacagggaccggagtattgaccgaatctaataagaaatttctgcccttccaacaattcggacgggacatagcagacacaaccgatgctgtcagggacccacagacacttgaaatactcgatatcaccccatgcagctttggcggagtctcagtcattacgcctggcaccaatacttccaatcaagttgcagtgctctatcaggatgtcaattgtactgaggtccccgtcgccatccacgcggatcaacttacccccacatggcgagtatatagtaccgggagcaacgtctttcaaacccgagcaggatgtctgataggtgccgaacacgtaaacaacagctacgaatgtgatatcccgatcggcgcagggatttgcgctagctaccaaacccaaactaattctccgcgccgccgcaggtccgtagcaagtcaatcaataatagcatacaccatgtcattgggagctgaaaacagcgtggcatatagcaacaattccatagctatccctacaaatttcacgatttctgttaccaccgaaattctgccagtgagcatgaccaaaacctcagtggattgtacgatgtacatatgcggcgattccacggaatgttccaatctccttttgcaatacggcagcttttgtacccaactgaatagagctctgacgggtatagcagtagagcaggataagaacactcaagaggtgtttgcccaggtcaaacaaatttacaagactcccccaataaaagactttggcggcttcaatttcagccaaatcttgccagacccttccaggcggcggcgctcatttatcgaagatttgcttttcaataaagtcaccctggccgacgccggatttattaaacaatacggcgattgtctgggcgacatcgccgcaagggacctcatctgtgcgcaaaagttcaatggcctgacggtgcttccaccactcctgactgatgagatgattgcccaatacacatctgccctgctggctggtacaataacgagtgggtggacctttggggctggagcagcattgcaaattccattcgccatgcaaatggcatatcgttttaacggcattggagtgactcaaaatgtgctgtatgaaaaccaaaagcttattgcaaatcagtttaattccgccattggcaaaatccaggatagcctcagtagtacagcaagcgccttggggaaactgcaagatgtggttaatcaaaatgcacaagctctcaataccctggtcaagcaacttagtagtaactttggtgccatcagcagcgttctcaacgacatcctgagtcgtcttgatcccccagaggcagaggttcaaattgaccggcttatcactggaaggcttcaatccctgcaaacttacgtgactcagcaactgatacgcgctgcagaaattcgggcctcagcaaaccttgccgcgacaaagatgagcgaatgcgtgctgggacaatccaagcgggtcgacttttgtggtaaaggctatcatctgatgagcttcccacagtccgctccacacggcgtcgttttcctgcacgtgacctatgtgccagcacaggagaagaactttacaacagccccggctatctgccacgatggcaaagctcactttcctagagagggagtgtttgtaagcaatggaacccattggttcgttacacaaagaaacttttatgagccgcaaattatcacaacagataatacattcgtctccgggaactgtgacgttgtgatagggattgtcaacaacacagtgtacgaccccctgcaacccgagctggattcatttaaagaagaactcgacaagtacttcaagaatcatactagtccagatgtggatctgggcgatatatcaggaatcaatgccagcgtggtcaatattcaaaaggagattgatagactgaacgaggttgccaagaatctgaatgaaagcctgatcgatctgcaagaattgggcaagtatgagcagtacattaaatggccctggtctggcgggagcggcggatctgggtctggatatattcccgaagctcctagagatggacaagcttacgtccgtaaagacggcgagtgggttcttctctccacattcctcggctgatga

SEQ ID NO: 144 - RNA, 3822 nt, Artificial Sequence
  Description of Artificial Sequence: Synthetic polynucleotide
ggauccgccaccauggauuggacguggauucuguuucugguggccgcagcgacaagggugcauucaauguuuguguuccugguccugcugccacuggucucaucacaguguguaaaccugacuacaagaacgcagcuuccgccugccuacacgaacagcuucaccaggggaguguauuauccugacaaagucuuuaggagcucuguucuccacuccacucaagaccuguuucugcccuucuucaguaacgugacuugguuucacgcaauacaugucuccggcacaaauggaaccaaaagauucgauaacccuguucucccauucaaugauggaguauauuuugcuagcacugaaaagucuaacauuauuagaggcuggauauuuggcacgacauuggacuccaagacgcaaagucucuugauugugaacaacgcaacaaacguggugauaaaaguuugcgaauuccaauuuugcaaugacccauuccugggaguuuacuaccacaagaauaacaaaagcuggauggaauccgaguuccggguuuacuccucugcuaacaacuguaccuuugaguaugugagucaaccauuccuuauggaucucgaaggaaaacaagguaacuucaagaaccugagggaguuuguguuuaagaauaucgauggcuauuuuaagauuuauagcaaacacacuccgauuaaucuggugagagaucucccgcaaggauuuucugcuuuggagccauugguugacuugccuauuggaaucaacaucacccguuuucaaacucugcuugcgcugcauagauccuaccuuacgccuggcgauucaagcaguggcuggaccgcgggagcggccgccuauuauguaggcuacuugcagccucgcaccuuucuccucaaguacaaugaaaacggcacaauuacagacgcaguggauugugcucuggacccccucagugaaacuaaauguacccugaaaagcuucacuguugagaaaggcauauaucaaaccucaaacuuuagagugcaaccuacugaaagcauuguaagauucccuaacauuacaaaccugugccccuuuggcgaagucuuuaaugcaacccgguuugcuagcguguaugcuuggaaccgcaagaggauauccaauugcgucgcagauuauuccguccuguauaacucugccagcuuuaguaccuucaaauguuaugggguaucucccacaaaacucaaugaucuuuguuucacaaaugucuaugcugacuccuuuguuaucagaggggacgaaguucgccaaauugcuccaggucaaacaggaaagauugcagauuauaacuacaagcuucccgacgauuuuacagguugugugauagcuuggaacuccaauaaucuggauuccaagguaggcgggaacuacaauuaucucuacaggcucuuccggaaauccaaucucaagccguucgaaagggauauaagcacugagaucuaucaagcaggcaguacacccuguaacggaguagagggcuucaacugcuacuuuccacugcaauccuauggguuucaaccgacuaacggugucggguaccaacccuaucgugucgugguccuguccuuugagcuucugcacgcuccugcuaccguuugcggccccaagaaaagcacgaauuuggucaagaacaaaugugucaacuuuaacuucaacggauugacagggaccggaguauugaccgaaucuaauaagaaauuucugcccuuccaacaauucggacgggacauagcagacacaaccgaugcugucagggacccacagacacuugaaauacucgauaucaccccaugcagcuuuggcggagucucagucauuacgccuggcaccaauacuuccaaucaaguugcagugcucuaucaggaugucaauuguacugagguccccgucgccauccacgcggaucaacuuacccccacauggcgaguauauaguaccgggagcaacgucuuucaaacccgagcaggaugucugauaggugccgaacacguaaacaacagcuacgaaugugauaucccgaucggcgcagggauuugcgcuagcuaccaaacccaaacuaauucuccgcgccgccgcagguccguagcaagucaaucaauaauagcauacaccaugucauugggagcugaaaacagcguggcauauagcaacaauuccauagcuaucccuacaaauuucacgauuucuguuaccaccgaaauucugccagugagcaugaccaaaaccucaguggauuguacgauguacauaugcggcgauuccacggaauguuccaaucuccuuuugcaauacggcagcuuuuguacccaacugaauagagcucugacggguauagcaguagagcaggauaagaacacucaagagguguuugcccaggucaaacaaauuuacaagacucccccaauaaaagacuuuggcggcuucaauuucagccaaaucuugccagacccuuccaggcggcggcgcucauuuaucgaagauuugcuuuucaauaaagucacccuggccgacgccggauuuauuaaacaauacggcgauugucugggcgacaucgccgcaagggaccucaucugugcgcaaaaguucaauggccugacggugcuuccaccacuccugacugaugagaugauugcccaauacacaucugcccugcuggcugguacaauaacgaguggguggaccuuuggggcuggagcagcauugcaaauuccauucgccaugcaaauggcauaucguuuuaacggcauuggagugacucaaaaugugcuguaugaaaaccaaaagcuuauugcaaaucaguuuaauuccgccauuggcaaaauccaggauagccucaguaguacagcaagcgccuuggggaaacugcaagaugugguuaaucaaaaugcacaagcucucaauacccuggucaagcaacuuaguaguaacuuuggugccaucagcagcguucucaacgacauccugagucgucuugaucccccagaggcagagguucaaauugaccggcuuaucacuggaaggcuucaaucccugcaaacuuacgugacucagcaacugauacgcgcugcagaaauucgggccucagcaaaccuugccgcgacaaagaugagcgaaugcgugcugggacaauccaagcgggucgacuuuugugguaaaggcuaucaucugaugagcuucccacaguccgcuccacacggcgucguuuuccugcacgugaccuaugugccagcacaggagaagaacuuuacaacagccccggcuaucugccacgauggcaaagcucacuuuccuagagagggaguguuuguaagcaauggaacccauugguucguuacacaaagaaacuuuuaugagccgcaaauuaucacaacagauaauacauucgucuccgggaacugugacguugugauagggauugucaacaacacaguguacgacccccugcaacccgagcuggauucauuuaaagaagaacucgacaaguacuucaagaaucauacuaguccagauguggaucugggcgauauaucaggaaucaaugccagcguggucaauauucaaaaggagauugauagacugaacgagguugccaagaaucugaaugaaagccugaucgaucugcaagaauugggcaaguaugagcaguacauuaaauggcccuggucuggcgggagcggcggaucugggucuggauauauucccgaagcuccuagagauggacaagcuuacguccguaaagacggcgaguggguucuucucuccacauuccucggcugauga

SEQ ID NO: 145 - protein, 1268 aa, Artificial Sequence
  Description of Artificial Sequence: Synthetic polypeptide
MDWTWILFLVAAATRVHSMFVFLVLLPLVSSQCVNLTTRTQLPPAYTNSFTRGVYYPDKVFRSSVLHSTQDLFLPFFSNVTWFHAIHVSGTNGTKRFDNPVLPFNDGVYFASTEKSNIIRGWIFGTTLDSKTQSLLIVNNATNVVIKVCEFQFCNDPFLGVYYHKNNKSWMESEFRVYSSANNCTFEYVSQPFLMDLEGKQGNFKNLREFVFKNIDGYFKIYSKHTPINLVRDLPQGFSALEPLVDLPIGINITRFQTLLALHRSYLTPGDSSSGWTAGAAAYYVGYLQPRTFLLKYNENGTITDAVDCALDPLSETKCTLKSFTVEKGIYQTSNFRVQPTESIVRFPNITNLCPFGEVFNATRFASVYAWNRKRISNCVADYSVLYNSASFSTFKCYGVSPTKLNDLCFTNVYADSFVIRGDEVRQIAPGQTGKIADYNYKLPDDFTGCVIAWNSNNLDSKVGGNYNYLYRLFRKSNLKPFERDISTEIYQAGSTPCNGVEGFNCYFPLQSYGFQPTNGVGYQPYRVVVLSFELLHAPATVCGPKKSTNLVKNKCVNFNFNGLTGTGVLTESNKKFLPFQQFGRDIADTTDAVRDPQTLEILDITPCSFGGVSVITPGTNTSNQVAVLYQDVNCTEVPVAIHADQLTPTWRVYSTGSNVFQTRAGCLIGAEHVNNSYECDIPIGAGICASYQTQTNSPRRRRSVASQSIIAYTMSLGAENSVAYSNNSIAIPTNFTISVTTEILPVSMTKTSVDCTMYICGDSTECSNLLLQYGSFCTQLNRALTGIAVEQDKNTQEVFAQVKQIYKTPPIKDFGGFNFSQILPDPSRRRRSFIEDLLFNKVTLADAGFIKQYGDCLGDIAARDLICAQKFNGLTVLPPLLTDEMIAQYTSALLAGTITSGWTFGAGAALQIPFAMQMAYRFNGIGVTQNVLYENQKLIANQFNSAIGKIQDSLSSTASALGKLQDVVNQNAQALNTLVKQLSSNFGAISSVLNDILSRLDPPEAEVQIDRLITGRLQSLQTYVTQQLIRAAEIRASANLAATKMSECVLGQSKRVDFCGKGYHLMSFPQSAPHGVVFLHVTYVPAQEKNFTTAPAICHDGKAHFPREGVFVSNGTHWFVTQRNFYEPQIITTDNTFVSGNCDVVIGIVNNTVYDPLQPELDSFKEELDKYFKNHTSPDVDLGDISGINASVVNIQKEIDRLNEVAKNLNESLIDLQELGKYEQYIKWPWSGGSGGSGSGYIPEAPRDGQAYVRKDGEWVLLSTFLG

SEQ ID NO: 146 - DNA, 3840 bp, Artificial Sequence
  Description of Artificial Sequence: Synthetic polynucleotide
ggatccgccaccatggattggacctggattctctttcttgtggcggcggcaacacgcgtccacagcatgttcgtctttctggtattgctgccgcttgtgagtagccagtgtgtgaacttgactaccaggacccagctcccaccggcttataccaattccttcacaagaggtgtctactatccagataaagttttccgcagctcagtgttgcatagcacacaggatctctttctgccattcttcagcaacgtcacgtggtttcatgcgatacacgttagtggaacaaacggaacaaaacgcttcgacaaccctgttctgccattcaatgacggagtttactttgcgagtaccgagaaatctaacatcattagagggtggatctttgggactacattggattctaaaacccagtcactcctcatagtcaataacgctacaaatgtggtgattaaggtatgcgaatttcagttttgcaacgacccatttctcggtgtatattatcacaagaataataaaagttggatggagtccgagttccgcgtctattcatcagccaataattgtactttcgaatatgtttctcaaccgtttctcatggatctcgaaggaaagcaagggaattttaagaatctccgggagtttgtcttcaagaacatagatggctattttaaaatttactcaaagcatactcctattaacctcgttcgggatctcccccagggttttagcgccctggagccactggttgatctgccaattgggattaatatcacacgctttcaaactctcctggcccttcacagatcttacttgaccccaggtgattcaagtagtggttggacagctggagctgctgcatattatgtaggttatctccaaccccgcacctttctcctcaaatataacgagaacggcaccattacagatgcggtggactgtgccttggaccctctttctgagaccaagtgcacactcaaaagcttcactgtcgaaaaggggatttaccagacatcaaattttagagttcaacccaccgaaagcattgtgagatttcctaacattacaaacttgtgcccatttggggaagtctttaacgctacacgctttgctagcgtctatgcttggaaccgaaaacggattagtaactgcgtagctgattattccgtcttgtacaacagcgcatcttttagcactttcaagtgttatggagtaagcccaacaaagctcaacgacctttgttttactaacgtctatgctgattcattcgtgattcgtggggatgaggttcgtcagatcgccccaggccaaaccgggaaaatcgctgattataattataaattgcctgacgattttaccggctgtgtaatcgcctggaattccaacaatcttgattccaaggttggcggcaactacaactatctctaccgtctgtttcgcaaatccaatctcaagcccttcgaacgcgatatttcaactgaaatctatcaggcagggtccactccgtgtaacggcgtagaaggatttaattgttacttcccattgcaaagttatggctttcaacccaccaacggagtcgggtaccaaccatacagagtcgtcgtgctctcatttgagctccttcatgcacctgccacggtgtgcggcccaaagaaatcaacgaaccttgtgaagaataaatgtgtcaattttaactttaatggcctgacagggactggcgtcctcacagaatctaataagaagtttctccctttccagcaatttggtcgcgatatagctgataccacagatgcagttagagacccacagacacttgagattctcgatattaccccgtgctcctttggcggcgtgtccgtcattactcccggtaccaatacgtctaaccaggtagcagtgctctaccaagatgtaaattgtactgaggtacccgtggcaatccatgccgaccaactgactccaacgtggcgggtttattcaaccggaagcaacgtgtttcaaacacgggctggctgccttataggcgctgagcacgtgaataatagttacgagtgtgatatcccgatcggagccggcatctgtgcatcttatcaaacacaaacaaactccccgcgccggcggagaagcgtggctagccaaagtataatcgcttatacaatgtccttgggcgcggaaaattcagtggcttattccaataattcaattgccattcctaccaactttacaattagcgtgaccacagaaatcttgcctgtgtctatgaccaagaccagcgtcgattgcaccatgtatatctgtggagatagcaccgagtgttcaaatttgctcctgcaatacggttccttttgtacacagcttaaccgcgccctcacaggtattgctgttgaacaagacaagaatactcaagaggtatttgctcaggtaaaacaaatttataagaccccaccgataaaagattttggcggtttcaatttctcccaaatattgccagatcctagtaggcgtcgtagatcatttatcgaggatctcctgttcaataaagtaaccctcgccgacgctggtttcatcaaacaatatggcgactgcctgggagatattgcagctagggatttgatttgtgcacagaagttcaatggactcaccgttctcccgcctctcctgacagatgagatgattgcacaatacacctctgctcttttggccgggaccattacgagcggttggacttttggcgcgggtgcggctctccaaattcctttcgcgatgcaaatggcgtatagatttaatggaattggcgttactcaaaacgtcttgtacgagaatcagaaactgatcgccaaccaatttaacagtgcaattggcaaaatccaagatagccttagttctactgcttcagcattgggtaagttgcaagatgtggtcaaccaaaacgcacaagcactcaataccctcgtgaagcaattgtccagcaattttggagctatctcaagtgtgctcaacgacatcctttctaggcttgatccacccgaggcagaggttcaaatcgacagactgataactggcaggctccaatctctgcaaacgtacgtgacacagcaactgattagggctgctgagatcagggcgtccgcgaatttggcagcaaccaaaatgagcgaatgcgtgctgggacaatcaaagagagttgatttctgtggaaagggttaccatctcatgtccttccctcaatcagctccccatggagttgtgtttctgcacgttacttacgtgccggcacaagaaaagaatttcaccactgcaccggctatatgtcatgatgggaaagcccacttcccgcgggaaggcgttttcgtgtccaacgggactcattggttcgtcacacaaaggaacttctatgagccacaaataattacaacagacaacacctttgtctctgggaactgcgatgtcgtgattggaatcgtgaacaacactgtctacgatccgctgcaacccgaactcgactcattcaaagaggaactggataagtatttcaagaaccataccagccccgatgtcgatctgggcgatatctccgggataaatgcttcagtagtaaacattcaaaaggaaatcgaccggctgaacgaggttgcgaagaatcttaatgagtcattgatcgacctgcaagaacttggtaagtatgagcagtacatcaagtggccttggtcaggccgcaggcgtcggcgtcgtgggagcggcggcagtgggagcggatatattccagaagcgccccgagacggacaagcttacgtacgaaaagacggagaatgggtactgctttccacttttcttggctaatga

SEQ ID NO: 147 - RNA, 3840 nt, Artificial Sequence
  Description of Artificial Sequence: Synthetic polynucleotide
ggauccgccaccauggauuggaccuggauucucuuucuuguggcggcggcaacacgcguccacagcauguucgucuuucugguauugcugccgcuugugaguagccagugugugaacuugacuaccaggacccagcucccaccggcuuauaccaauuccuucacaagaggugucuacuauccagauaaaguuuuccgcagcucaguguugcauagcacacaggaucucuuucugccauucuucagcaacgucacgugguuucaugcgauacacguuaguggaacaaacggaacaaaacgcuucgacaacccuguucugccauucaaugacggaguuuacuuugcgaguaccgagaaaucuaacaucauuagaggguggaucuuugggacuacauuggauucuaaaacccagucacuccucauagucaauaacgcuacaaauguggugauuaagguaugcgaauuucaguuuugcaacgacccauuucucgguguauauuaucacaagaauaauaaaaguuggauggaguccgaguuccgcgucuauucaucagccaauaauuguacuuucgaauauguuucucaaccguuucucauggaucucgaaggaaagcaagggaauuuuaagaaucuccgggaguuugucuucaagaacauagauggcuauuuuaaaauuuacucaaagcauacuccuauuaaccucguucgggaucucccccaggguuuuagcgcccuggagccacugguugaucugccaauugggauuaauaucacacgcuuucaaacucuccuggcccuucacagaucuuacuugaccccaggugauucaaguagugguuggacagcuggagcugcugcauauuauguagguuaucuccaaccccgcaccuuucuccucaaauauaacgagaacggcaccauuacagaugcgguggacugugccuuggacccucuuucugagaccaagugcacacucaaaagcuucacugucgaaaaggggauuuaccagacaucaaauuuuagaguucaacccaccgaaagcauugugagauuuccuaacauuacaaacuugugcccauuuggggaagucuuuaacgcuacacgcuuugcuagcgucuaugcuuggaaccgaaaacggauuaguaacugcguagcugauuauuccgucuuguacaacagcgcaucuuuuagcacuuucaaguguuauggaguaagcccaacaaagcucaacgaccuuuguuuuacuaacgucuaugcugauucauucgugauucguggggaugagguucgucagaucgccccaggccaaaccgggaaaaucgcugauuauaauuauaaauugccugacgauuuuaccggcuguguaaucgccuggaauuccaacaaucuugauuccaagguuggcggcaacuacaacuaucucuaccgucuguuucgcaaauccaaucucaagcccuucgaacgcgauauuucaacugaaaucuaucaggcaggguccacuccguguaacggcguagaaggauuuaauuguuacuucccauugcaaaguuauggcuuucaacccaccaacggagucggguaccaaccauacagagucgucgugcucucauuugagcuccuucaugcaccugccacggugugcggcccaaagaaaucaacgaaccuugugaagaauaaaugugucaauuuuaacuuuaauggccugacagggacuggcguccucacagaaucuaauaagaaguuucucccuuuccagcaauuuggucgcgauauagcugauaccacagaugcaguuagagacccacagacacuugagauucucgauauuaccccgugcuccuuuggcggcguguccgucauuacucccgguaccaauacgucuaaccagguagcagugcucuaccaagauguaaauuguacugagguacccguggcaauccaugccgaccaacugacuccaacguggcggguuuauucaaccggaagcaacguguuucaaacacgggcuggcugccuuauaggcgcugagcacgugaauaauaguuacgagugugauaucccgaucggagccggcaucugugcaucuuaucaaacacaaacaaacuccccgcgccggcggagaagcguggcuagccaaaguauaaucgcuuauacaauguccuugggcgcggaaaauucaguggcuuauuccaauaauucaauugccauuccuaccaacuuuacaauuagcgugaccacagaaaucuugccugugucuaugaccaagaccagcgucgauugcaccauguauaucuguggagauagcaccgaguguucaaauuugcuccugcaauacgguuccuuuuguacacagcuuaaccgcgcccucacagguauugcuguugaacaagacaagaauacucaagagguauuugcucagguaaaacaaauuuauaagaccccaccgauaaaagauuuuggcgguuucaauuucucccaaauauugccagauccuaguaggcgucguagaucauuuaucgaggaucuccuguucaauaaaguaacccucgccgacgcugguuucaucaaacaauauggcgacugccugggagauauugcagcuagggauuugauuugugcacagaaguucaauggacucaccguucucccgccucuccugacagaugagaugauugcacaauacaccucugcucuuuuggccgggaccauuacgagcgguuggacuuuuggcgcgggugcggcucuccaaauuccuuucgcgaugcaaauggcguauagauuuaauggaauuggcguuacucaaaacgucuuguacgagaaucagaaacugaucgccaaccaauuuaacagugcaauuggcaaaauccaagauagccuuaguucuacugcuucagcauuggguaaguugcaagauguggucaaccaaaacgcacaagcacucaauacccucgugaagcaauuguccagcaauuuuggagcuaucucaagugugcucaacgacauccuuucuaggcuugauccacccgaggcagagguucaaaucgacagacugauaacuggcaggcuccaaucucugcaaacguacgugacacagcaacugauuagggcugcugagaucagggcguccgcgaauuuggcagcaaccaaaaugagcgaaugcgugcugggacaaucaaagagaguugauuucuguggaaaggguuaccaucucauguccuucccucaaucagcuccccauggaguuguguuucugcacguuacuuacgugccggcacaagaaaagaauuucaccacugcaccggcuauaugucaugaugggaaagcccacuucccgcgggaaggcguuuucguguccaacgggacucauugguucgucacacaaaggaacuucuaugagccacaaauaauuacaacagacaacaccuuugucucugggaacugcgaugucgugauuggaaucgugaacaacacugucuacgauccgcugcaacccgaacucgacucauucaaagaggaacuggauaaguauuucaagaaccauaccagccccgaugucgaucugggcgauaucuccgggauaaaugcuucaguaguaaacauucaaaaggaaaucgaccggcugaacgagguugcgaagaaucuuaaugagucauugaucgaccugcaagaacuugguaaguaugagcaguacaucaaguggccuuggucaggccgcaggcgucggcgucgugggagcggcggcagugggagcggauauauuccagaagcgccccgagacggacaagcuuacguacgaaaagacggagaauggguacugcuuuccacuuuucuuggcuaauga

SEQ ID NO: 148 - protein, 1274 aa, Artificial Sequence
  Description of Artificial Sequence: Synthetic polypeptide
MDWTWILFLVAAATRVHSMFVFLVLLPLVSSQCVNLTTRTQLPPAYTNSFTRGVYYPDKVFRSSVLHSTQDLFLPFFSNVTWFHAIHVSGTNGTKRFDNPVLPFNDGVYFASTEKSNIIRGWIFGTTLDSKTQSLLIVNNATNVVIKVCEFQFCNDPFLGVYYHKNNKSWMESEFRVYSSANNCTFEYVSQPFLMDLEGKQGNFKNLREFVFKNIDGYFKIYSKHTPINLVRDLPQGFSALEPLVDLPIGINITRFQTLLALHRSYLTPGDSSSGWTAGAAAYYVGYLQPRTFLLKYNENGTITDAVDCALDPLSETKCTLKSFTVEKGIYQTSNFRVQPTESIVRFPNITNLCPFGEVFNATRFASVYAWNRKRISNCVADYSVLYNSASFSTFKCYGVSPTKLNDLCFTNVYADSFVIRGDEVRQIAPGQTGKIADYNYKLPDDFTGCVIAWNSNNLDSKVGGNYNYLYRLFRKSNLKPFERDISTEIYQAGSTPCNGVEGFNCYFPLQSYGFQPTNGVGYQPYRVVVLSFELLHAPATVCGPKKSTNLVKNKCVNFNFNGLTGTGVLTESNKKFLPFQQFGRDIADTTDAVRDPQTLEILDITPCSFGGVSVITPGTNTSNQVAVLYQDVNCTEVPVAIHADQLTPTWRVYSTGSNVFQTRAGCLIGAEHVNNSYECDIPIGAGICASYQTQTNSPRRRRSVASQSIIAYTMSLGAENSVAYSNNSIAIPTNFTISVTTEILPVSMTKTSVDCTMYICGDSTECSNLLLQYGSFCTQLNRALTGIAVEQDKNTQEVFAQVKQIYKTPPIKDFGGFNFSQILPDPSRRRRSFIEDLLFNKVTLADAGFIKQYGDCLGDIAARDLICAQKFNGLTVLPPLLTDEMIAQYTSALLAGTITSGWTFGAGAALQIPFAMQMAYRFNGIGVTQNVLYENQKLIANQFNSAIGKIQDSLSSTASALGKLQDVVNQNAQALNTLVKQLSSNFGAISSVLNDILSRLDPPEAEVQIDRLITGRLQSLQTYVTQQLIRAAEIRASANLAATKMSECVLGQSKRVDFCGKGYHLMSFPQSAPHGVVFLHVTYVPAQEKNFTTAPAICHDGKAHFPREGVFVSNGTHWFVTQRNFYEPQIITTDNTFVSGNCDVVIGIVNNTVYDPLQPELDSFKEELDKYFKNHTSPDVDLGDISGINASVVNIQKEIDRLNEVAKNLNESLIDLQELGKYEQYIKWPWSGRRRRRRGSGGSGSGYIPEAPRDGQAYVRKDGEWVLLSTFLG

SEQ ID NO: 149 - DNA, 3840 bp, Artificial Sequence
  Description of Artificial Sequence: Synthetic polynucleotide
ggatccgccaccatggattggacctggatcttgtttctcgtcgcagctgccacaagagtccacagtatgtttgtatttctcgttctcctgcctcttgtgtcctctcagtgtgtgaatctgacgaccagaactcagctcccacccgcatacactaacagtatcacgaggggcgtttattacccagacaaggttttccgaagcagttgtctgtatagtacacaggatttgttcctgccattctttagtaacgtgacttggtttcatgcgatccacgtttctggcacaaacggtaccaaaagattcgataaccccgtgctgcctttcaatgacggcgtgtatttcgcttctactgaaaagtccggcatcatccggggatggatcttcggcactactttggatagcaaaacccaatccctgctgattgtgaataatgcaaccaacgtggtgatcaaagtctgtgagtttcaattctgtaatgacccatttctgggcgtttactaccacaagaacaacaaaagttggatggagtccgaatttcgcgtctactcatccgcgaacaattgcacatttgagtatgtgagtcaaccattcttgatggatcttgaagggaagcaaggcaatttcaagaacctgcgggagtttgtatttaagaacattgacggctatttcaagatatattctaaacatactcccattaacctcgtgcgcgacttgccccagggattcagtgctctggaaccactggtcgatctccccatcggcattaatattacacgctttcaaactctcctcgctttgcatcggtcctatcttactccgggagatagctcaagcggatggacggcaggcgcggcggcatattatgttggatatctccaaccacgcacgttccttctgaaatataatgaaaatggcactattactgatgcagtcgactgcgccctggaccctctgtctgagaccaagtgtaccctgaagtcattcaccgttgagaagggaatctaccaaacctctaactttagggtacaacctactgagagcattgtccgcttcccgaatatcaccaatctttgtccgtttggtgaggtgtttaacgcgacacgatttgcttccgtatacgcctggaatcgcaaacgcatcagcaactgtgtggctgattactcatttctctataattccgcttccttctctactttcaagtgttatggggtgaatgggactaaacttaatgacttgtgctttactaacgtgtatgctgatagcttcgtcattcgtggagatgaggtcaggcaaatagctcccggacaaacagggaagatagcggactataactacaaactgcctgatgatttcaccgggtgcgtcatcgcgtggaacagcaataacctcgatagcaaggttggcggaaactataattatctctatcgtttgtttaggaaaagcaatctcaagcccttcgagcgggatattaatacaacgatatatcaagctggctctaccccgtgcaacggagtagagggcttcaattgctactttcctttgcagtcctacggattccaacccaccaacggagtgggctaccaaccataccgtgtcgtggttttgagtttcgaactgaaccacgcaccagcaacagtctgcggaccgaagaagagtacaaaccttgtgaagaataagtgcgtgaactttaatttcaatggcctgactggaaccggagttctgacggaatccaataagaaatttctgccgtttcagcaatttggacgggattgtgctggaacgactgatgccgtacgtgatcctcaaacactggaaatcctggacataaccccttgttcctttggtggcgtaagcgttattactccaggcacaaacacatcaaatcaagtcgccgtactgtatcaaggtgtcaactgtactgaagtacctgtagccattcatgcaggacaactgacccctacatggcgagtgtattcaacgggaagcaacgtatttcaaaccagggccggctgtctcatcggagcagagcatgtcaataatagttatgaatgcgacatcccaataggtgctgggatctgcgcgagctaccaaacccaaactaatagcccacgaagacggagatctgtcgcgtcccaaagcattattgcgtacacgatgagcctctgtgcagaaaattcagttgcctacagcaacaatagcatcgctattccaaccaatttcactatcagctgtacaacagaaattctcccagtctccatgacgaagacatcctgcgattgtacaatgtatatatgcggcgactcaacagaatgttcaaatttgttgctgcaatacgggtccttctgcacccaactcaatcgagctcttacaggcatagcggtcgaacaagacaagaacacacaagaagtgtttgcccaagttaaacagtgttacaagacaccacctatcaaagatttcggcggttttaacttttctcagatcttgccagacccatctaggcggcggcgatcctttatcgaggaccttctcttcaataaggtaactcttgcagacgctggatttattaagcaatacggcgactgtctcggggatatcgccgctagggatctgatctgtgcccagaaatttaacggctgcacggtgctgccccctctgctgactgatgaaatgatagcacaatatacttctgcattgctggccggtaccattacatcaggatggacatttggtgccggggcggcgctccaaattcccttcgccatgcaaatggcctataggtttaacggcatcggggtgacccaaaacgtcctctatgagaatcaaaagctgattgctaaccagtttaactcagcaataggaaagattcaagactctctgtcaagtaccgcatccgcccttggaaagctccaagacgttgttaaccagaatgcacaagctctcaacacgctcgtgaaacaactctcttcaaattttggtgcgatctcttctggcccaaatgacattttgagccggcttcccaaggtagaagctgaagtacaaattgatcgcctgatcaccggacggctccaaagtctgcagacgtacgtcacccagcaactgatacgggcagcggagatccgggcttctgccaacctggccgccacgaagatgagcgaatgcgtgctcggacagtccaaaagagtagatttctgtggcaagggctatcatctcatgtcctttccccaatccgcccctcacggagttgtcttccttcattgcacttacgtccccgctcaagaaaagaattttactacggcacctgctatctgtcacgacgggaaagcccattttcctagagaaggtgtgtttgtatctaacggcacgcactggttcgtcacgcaacgtaacttttacgagccccagatcatcaccacagacaatacggatgtatcaggtaattgtgatgtcctgattggtatcgtcaataacactgtatacgatcctttgcaaccggaactggactcctttaaagaggaacttgataagtatttcaagaatcacacttccccagatgtcgatctcggggacatctcaggaattaatgcatcagtggtcaatattcaaaaggaaattgatcgcttgaatgaggttgcaaagaatttgaatgaaagccttatcgaccttcaagagctgggcaaatatgagcagtacattaaatggccttggagcggtcgccggcgccgaaggcggggttccggcggtagcggtagcggttatattccagaagctcctcgcgatgggcaggcttatgtgaggaaagatggtgaatgggtccttttgtccacgttcctcgggtagtaa

SEQ ID NO: 150 - RNA, 3840 nt, Artificial Sequence
  Description of Artificial Sequence: Synthetic polynucleotide
ggauccgccaccauggauuggaccuggaucuuguuucucgucgcagcugccacaagaguccacaguauguuuguauuucucguucuccugccucuuguguccucucagugugugaaucugacgaccagaacucagcucccacccgcauacacuaacaguaucacgaggggcguuuauuacccagacaagguuuuccgaagcaguugucuguauaguacacaggauuuguuccugccauucuuuaguaacgugacuugguuucaugcgauccacguuucuggcacaaacgguaccaaaagauucgauaaccccgugcugccuuucaaugacggcguguauuucgcuucuacugaaaaguccggcaucauccggggauggaucuucggcacuacuuuggauagcaaaacccaaucccugcugauugugaauaaugcaaccaacguggugaucaaagucugugaguuucaauucuguaaugacccauuucugggcguuuacuaccacaagaacaacaaaaguuggauggaguccgaauuucgcgucuacucauccgcgaacaauugcacauuugaguaugugagucaaccauucuugauggaucuugaagggaagcaaggcaauuucaagaaccugcgggaguuuguauuuaagaacauugacggcuauuucaagauauauucuaaacauacucccauuaaccucgugcgcgacuugccccagggauucagugcucuggaaccacuggucgaucuccccaucggcauuaauauuacacgcuuucaaacucuccucgcuuugcaucgguccuaucuuacuccgggagauagcucaagcggauggacggcaggcgcggcggcauauuauguuggauaucuccaaccacgcacguuccuucugaaauauaaugaaaauggcacuauuacugaugcagucgacugcgcccuggacccucugucugagaccaaguguacccugaagucauucaccguugagaagggaaucuaccaaaccucuaacuuuaggguacaaccuacugagagcauuguccgcuucccgaauaucaccaaucuuuguccguuuggugagguguuuaacgcgacacgauuugcuuccguauacgccuggaaucgcaaacgcaucagcaacuguguggcugauuacucauuucucuauaauuccgcuuccuucucuacuuucaaguguuauggggugaaugggacuaaacuuaaugacuugugcuuuacuaacguguaugcugauagcuucgucauucguggagaugaggucaggcaaauagcucccggacaaacagggaagauagcggacuauaacuacaaacugccugaugauuucaccgggugcgucaucgcguggaacagcaauaaccucgauagcaagguuggcggaaacuauaauuaucucuaucguuuguuuaggaaaagcaaucucaagcccuucgagcgggauauuaauacaacgauauaucaagcuggcucuaccccgugcaacggaguagagggcuucaauugcuacuuuccuuugcaguccuacggauuccaacccaccaacggagugggcuaccaaccauaccgugucgugguuuugaguuucgaacugaaccacgcaccagcaacagucugcggaccgaagaagaguacaaaccuugugaagaauaagugcgugaacuuuaauuucaauggccugacuggaaccggaguucugacggaauccaauaagaaauuucugccguuucagcaauuuggacgggauugugcuggaacgacugaugccguacgugauccucaaacacuggaaauccuggacauaaccccuuguuccuuugguggcguaagcguuauuacuccaggcacaaacacaucaaaucaagucgccguacuguaucaaggugucaacuguacugaaguaccuguagccauucaugcaggacaacugaccccuacauggcgaguguauucaacgggaagcaacguauuucaaaccagggccggcugucucaucggagcagagcaugucaauaauaguuaugaaugcgacaucccaauaggugcugggaucugcgcgagcuaccaaacccaaacuaauagcccacgaagacggagaucugucgcgucccaaagcauuauugcguacacgaugagccucugugcagaaaauucaguugccuacagcaacaauagcaucgcuauuccaaccaauuucacuaucagcuguacaacagaaauucucccagucuccaugacgaagacauccugcgauuguacaauguauauaugcggcgacucaacagaauguucaaauuuguugcugcaauacggguccuucugcacccaacucaaucgagcucuuacaggcauagcggucgaacaagacaagaacacacaagaaguguuugcccaaguuaaacaguguuacaagacaccaccuaucaaagauuucggcgguuuuaacuuuucucagaucuugccagacccaucuaggcggcggcgauccuuuaucgaggaccuucucuucaauaagguaacucuugcagacgcuggauuuauuaagcaauacggcgacugucucggggauaucgccgcuagggaucugaucugugcccagaaauuuaacggcugcacggugcugcccccucugcugacugaugaaaugauagcacaauauacuucugcauugcuggccgguaccauuacaucaggauggacauuuggugccggggcggcgcuccaaauucccuucgccaugcaaauggccuauagguuuaacggcaucggggugacccaaaacguccucuaugagaaucaaaagcugauugcuaaccaguuuaacucagcaauaggaaagauucaagacucucugucaaguaccgcauccgcccuuggaaagcuccaagacguuguuaaccagaaugcacaagcucucaacacgcucgugaaacaacucucuucaaauuuuggugcgaucucuucuggcccaaaugacauuuugagccggcuucccaagguagaagcugaaguacaaauugaucgccugaucaccggacggcuccaaagucugcagacguacgucacccagcaacugauacgggcagcggagauccgggcuucugccaaccuggccgccacgaagaugagcgaaugcgugcucggacaguccaaaagaguagauuucuguggcaagggcuaucaucucauguccuuuccccaauccgccccucacggaguugucuuccuucauugcacuuacguccccgcucaagaaaagaauuuuacuacggcaccugcuaucugucacgacgggaaagcccauuuuccuagagaagguguguuuguaucuaacggcacgcacugguucgucacgcaacguaacuuuuacgagccccagaucaucaccacagacaauacggauguaucagguaauugugauguccugauugguaucgucaauaacacuguauacgauccuuugcaaccggaacuggacuccuuuaaagaggaacuugauaaguauuucaagaaucacacuuccccagaugucgaucucggggacaucucaggaauuaaugcaucaguggucaauauucaaaaggaaauugaucgcuugaaugagguugcaaagaauuugaaugaaagccuuaucgaccuucaagagcugggcaaauaugagcaguacauuaaauggccuuggagcggucgccggcgccgaaggcgggguuccggcgguagcgguagcgguuauauuccagaagcuccucgcgaugggcaggcuuaugugaggaaagauggugaauggguccuuuuguccacguuccucggguaguaa

SEQ ID NO: 151 - protein, 1274 aa, Artificial Sequence
  Description of Artificial Sequence: Synthetic polypeptide
MDWTWILFLVAAATRVHSMFVFLVLLPLVSSQCVNLTTRTQLPPAYTNSITRGVYYPDKVFRSSCLYSTQDLFLPFFSNVTWFHAIHVSGTNGTKRFDNPVLPFNDGVYFASTEKSGIIRGWIFGTTLDSKTQSLLIVNNATNVVIKVCEFQFCNDPFLGVYYHKNNKSWMESEFRVYSSANNCTFEYVSQPFLMDLEGKQGNFKNLREFVFKNIDGYFKIYSKHTPINLVRDLPQGFSALEPLVDLPIGINITRFQTLLALHRSYLTPGDSSSGWTAGAAAYYVGYLQPRTFLLKYNENGTITDAVDCALDPLSETKCTLKSFTVEKGIYQTSNFRVQPTESIVRFPNITNLCPFGEVFNATRFASVYAWNRKRISNCVADYSFLYNSASFSTFKCYGVNGTKLNDLCFTNVYADSFVIRGDEVRQIAPGQTGKIADYNYKLPDDFTGCVIAWNSNNLDSKVGGNYNYLYRLFRKSNLKPFERDINTTIYQAGSTPCNGVEGFNCYFPLQSYGFQPTNGVGYQPYRVVVLSFELNHAPATVCGPKKSTNLVKNKCVNFNFNGLTGTGVLTESNKKFLPFQQFGRDCAGTTDAVRDPQTLEILDITPCSFGGVSVITPGTNTSNQVAVLYQGVNCTEVPVAIHAGQLTPTWRVYSTGSNVFQTRAGCLIGAEHVNNSYECDIPIGAGICASYQTQTNSPRRRRSVASQSIIAYTMSLCAENSVAYSNNSIAIPTNFTISCTTEILPVSMTKTSCDCTMYICGDSTECSNLLLQYGSFCTQLNRALTGIAVEQDKNTQEVFAQVKQCYKTPPIKDFGGFNFSQILPDPSRRRRSFIEDLLFNKVTLADAGFIKQYGDCLGDIAARDLICAQKFNGCTVLPPLLTDEMIAQYTSALLAGTITSGWTFGAGAALQIPFAMQMAYRFNGIGVTQNVLYENQKLIANQFNSAIGKIQDSLSSTASALGKLQDVVNQNAQALNTLVKQLSSNFGAISSGPNDILSRLPKVEAEVQIDRLITGRLQSLQTYVTQQLIRAAEIRASANLAATKMSECVLGQSKRVDFCGKGYHLMSFPQSAPHGVVFLHCTYVPAQEKNFTTAPAICHDGKAHFPREGVFVSNGTHWFVTQRNFYEPQIITTDNTDVSGNCDVLIGIVNNTVYDPLQPELDSFKEELDKYFKNHTSPDVDLGDISGINASVVNIQKEIDRLNEVAKNLNESLIDLQELGKYEQYIKWPWSGRRRRRRGSGGSGSGYIPEAPRDGQAYVRKDGEWVLLSTFLG

SEQ ID NO: 152 - DNA, 3840 bp, Artificial Sequence
  Description of Artificial Sequence: Synthetic polynucleotide
ggatccgccaccatggactggacatggatacttttcttggtagcggcggcgacacgcgtgcactccatgtttgttttcctcgtcctgctcccacttgtctcaagtcaatgcgttaacctgactacgaggacgcagctcccgcccgcctacacaaactcttttacccggggtgtgtactaccccgacaaagttttccgcagttcatgtctccactcaacacaggacctctttctgccattcttctcaaatgtcacatggtttcacgccatccacgtttccggcactaacggtaccaaacggttcgacaaccctgttctgccattcaatgatggggtgtattttgcgagcacagagaagtccaatataatcagaggttggatcttcggtacaacgctggacagtaaaactcaatctctgctgatagtgaataacgctacgaacgtcgtcattaaggtgtgcgagtttcaattttgcaacgatccattcttgggagtgtactatcataagaacaacaaatcatggatggagagcgagtttagggtgtattcctctgcaaacaactgtacatttgaatacgtgagccagccttttcttatggacctcgaaggtaagcaaggtaacttcaagaacttgcgggaatttgttttcaagaacattgatggatacttcaaaatttactccaaacatacccctatcaatctggtccgcgaccttccacaaggattttccgcacttgaacccttggtcgacctgcctattggaatcaatatcacgcggtttcagacgcttctcgctctccatagatcctacctcacgcccggcgacagttcaagtgggtggaccgcaggcgcggcggcctattatgtgggatacttgcaaccccgcacttttctcctgaaatataatgagaatgggaccataaccgatgcagttgattgtgccttggaccccctgtccgagaccaaatgcacgctgaagtctttcacagtagagaagggaatttaccaaacttccaacttcagagttcaacccacagaatctatcgttcgctttcccaatattacaaatttgtgtccgtttggagaggtgttcaatgctacaaggtttgcttccgtatatgcctggaatcgtaaacgcatctctaattgcgtagcggactactcagttttgtataacagtgctagcttctccactttcaagtgttacggcgttaatgggaccaagctgaatgacctgtgttttaccaacgtgtatgctgactccttcgtaataagaggggatgaggttaggcaaatcgcccctggccagacagggaaaatcgctgattacaattacaagttgccagatgactttaccgggtgtgtcatcgcttggaactccaataatctggattccaaagttggtgggaactataattacctctatcggctgttcagaaaatccaaccttaagcccttcgaaagagatatcaacactacaatttatcaggctggttcaactccgtgtaatggggtcgagggtttcaactgctacttcccgttgcagagttatgggttccagccgacgaatggggtcgggtaccaaccgtacagagtagtagttctgtcctttgagttgaatcatgccccagcaacagtgtgcggcccaaagaaatcaacaaaccttgttaagaataaatgcgtgaacttcaactttaacgggcttactgggactggggtgctcacagaatccaacaagaaattcttgccattccaacaatttggccgcgattgtgcagatacaaccgacgccgtgagagatccccaaacattggagatacttgatatcactccctgctcttttggtggcgtcagcgtcatcaccccaggaaccaatacaagcaatcaagtggctgtcctttatcaagatgtcaattgtaccgaagtcccagtcgcaatacatgcggatcaactgaccccaacatggagagtttactcaacgggatctaacgtgtttcaaactcgtgctggctgcctgataggagcggagcatgtgaataattcctatgaatgcgacattcccattggggctggaatctgtgcatcctatcaaacacaaactaactctccccgccggcggcggagcgtcgccagccaaagcattattgcatatacgatgtccctgtgcgcagaaaattctgttgcatacagcaataactccatcgctatccctacaaactttaccatcagctgtacaaccgaaatcttgcccgtttctatgactaaaacaagttgtgactgcactatgtacatctgtggcgactcaacagagtgttctaaccttctgcttcaatatggatctttctgtacacaacttaatcgcgctctcaccggtatagctgttgagcaagataagaacactcaggaagttttcgcccaagtcaaacaatgttataaaacaccacccataaaagacttcggcggatttaatttctctcaaatactgccggacccatccaggagacgaagaagcttcatagaagatcttctcttcaacaaggtgaccctggccgatgcggggtttatcaagcaatatggcgactgtctcggcgatattgctgcacgcgatctgatatgtgcacagaaattcaatgggtgtaccgtgctcccacctctgctgacagatgaaatgatcgctcaatataccagtgcgctcttggctggaacaattactagtggttggacttttggggctggagccgcactccaaatcccttttgccatgcaaatggcctatcgctttaatgggataggggtcactcagaatgtcttgtatgaaaaccagaagttgattgctaaccaatttaattcagctatagggaaaattcaagacagcctcagtagtactgccagtgccctgggcaaactgcaagatgtcgtgaaccaaaatgctcaagccctgaataccctcgttaagcaacttagctcaaactttggtgcgatttcctcaggccctaatgacatcctctcaaggctgcctaaagtggaagctgaggtccaaatcgatcgcctgattacgggtcgcctgcaatcactccaaacatatgtcacccagcagttgatcagagcggccgagatacgggcatcagcaaatttggcggccacgaaaatgtcagagtgcgtacttggtcaaagtaaaagagttgatttctgcggaaaaggttaccaccttatgtctttcccccagtccgctccacatggagtggtctttctgcattgtacttatgtgccagcccaagaaaagaattttactaccgcccccgctatttgtcatgatggtaaggcgcacttccccagagaaggagtgtttgtgtccaacgggactcactggtttgtgactcaaaggaacttttatgaacctcaaattatcaccacagataacacatttgtgtccgggaattgcgatgtggttatcggcattgttaataataccgtttacgatcccttgcaacctgagttggatagtttcaaggaagaacttgacaaatactttaagaatcacacttccccggatgtagacctcggggacatttccggaattaatgcgagtgttgtgaatatacagaaagagatagaccgactcaacgaggttgctaagaacctcaacgagagccttatcgatcttcaagaactcggcaaatacgagcaatacattaaatggccttggtccggcagaaggagacggcgaaggggaagtggcggcagcggctctggatacatcccggaagctccacgggatgggcaagcatatgttcgcaaggatggagaatgggtccttcttagcaccttcttgggataatga

SEQ ID NO: 153 - RNA, 3840 nt, Artificial Sequence
  Description of Artificial Sequence: Synthetic polynucleotide
ggauccgccaccauggacuggacauggauacuuuucuugguagcggcggcgacacgcgugcacuccauguuuguuuuccucguccugcucccacuugucucaagucaaugcguuaaccugacuacgaggacgcagcucccgcccgccuacacaaacucuuuuacccgggguguguacuaccccgacaaaguuuuccgcaguucaugucuccacucaacacaggaccucuuucugccauucuucucaaaugucacaugguuucacgccauccacguuuccggcacuaacgguaccaaacgguucgacaacccuguucugccauucaaugaugggguguauuuugcgagcacagagaaguccaauauaaucagagguuggaucuucgguacaacgcuggacaguaaaacucaaucucugcugauagugaauaacgcuacgaacgucgucauuaaggugugcgaguuucaauuuugcaacgauccauucuugggaguguacuaucauaagaacaacaaaucauggauggagagcgaguuuaggguguauuccucugcaaacaacuguacauuugaauacgugagccagccuuuucuuauggaccucgaagguaagcaagguaacuucaagaacuugcgggaauuuguuuucaagaacauugauggauacuucaaaauuuacuccaaacauaccccuaucaaucugguccgcgaccuuccacaaggauuuuccgcacuugaacccuuggucgaccugccuauuggaaucaauaucacgcgguuucagacgcuucucgcucuccauagauccuaccucacgcccggcgacaguucaaguggguggaccgcaggcgcggcggccuauuaugugggauacuugcaaccccgcacuuuucuccugaaauauaaugagaaugggaccauaaccgaugcaguugauugugccuuggacccccuguccgagaccaaaugcacgcugaagucuuucacaguagagaagggaauuuaccaaacuuccaacuucagaguucaacccacagaaucuaucguucgcuuucccaauauuacaaauuuguguccguuuggagagguguucaaugcuacaagguuugcuuccguauaugccuggaaucguaaacgcaucucuaauugcguagcggacuacucaguuuuguauaacagugcuagcuucuccacuuucaaguguuacggcguuaaugggaccaagcugaaugaccuguguuuuaccaacguguaugcugacuccuucguaauaagaggggaugagguuaggcaaaucgccccuggccagacagggaaaaucgcugauuacaauuacaaguugccagaugacuuuaccgggugugucaucgcuuggaacuccaauaaucuggauuccaaaguuggugggaacuauaauuaccucuaucggcuguucagaaaauccaaccuuaagcccuucgaaagagauaucaacacuacaauuuaucaggcugguucaacuccguguaauggggucgaggguuucaacugcuacuucccguugcagaguuauggguuccagccgacgaauggggucggguaccaaccguacagaguaguaguucuguccuuugaguugaaucaugccccagcaacagugugcggcccaaagaaaucaacaaaccuuguuaagaauaaaugcgugaacuucaacuuuaacgggcuuacugggacuggggugcucacagaauccaacaagaaauucuugccauuccaacaauuuggccgcgauugugcagauacaaccgacgccgugagagauccccaaacauuggagauacuugauaucacucccugcucuuuugguggcgucagcgucaucaccccaggaaccaauacaagcaaucaaguggcuguccuuuaucaagaugucaauuguaccgaagucccagucgcaauacaugcggaucaacugaccccaacauggagaguuuacucaacgggaucuaacguguuucaaacucgugcuggcugccugauaggagcggagcaugugaauaauuccuaugaaugcgacauucccauuggggcuggaaucugugcauccuaucaaacacaaacuaacucuccccgccggcggcggagcgucgccagccaaagcauuauugcauauacgaugucccugugcgcagaaaauucuguugcauacagcaauaacuccaucgcuaucccuacaaacuuuaccaucagcuguacaaccgaaaucuugcccguuucuaugacuaaaacaaguugugacugcacuauguacaucuguggcgacucaacagaguguucuaaccuucugcuucaauauggaucuuucuguacacaacuuaaucgcgcucucaccgguauagcuguugagcaagauaagaacacucaggaaguuuucgcccaagucaaacaauguuauaaaacaccacccauaaaagacuucggcggauuuaauuucucucaaauacugccggacccauccaggagacgaagaagcuucauagaagaucuucucuucaacaaggugacccuggccgaugcgggguuuaucaagcaauauggcgacugucucggcgauauugcugcacgcgaucugauaugugcacagaaauucaauggguguaccgugcucccaccucugcugacagaugaaaugaucgcucaauauaccagugcgcucuuggcuggaacaauuacuagugguuggacuuuuggggcuggagccgcacuccaaaucccuuuugccaugcaaauggccuaucgcuuuaaugggauaggggucacucagaaugucuuguaugaaaaccagaaguugauugcuaaccaauuuaauucagcuauagggaaaauucaagacagccucaguaguacugccagugcccugggcaaacugcaagaugucgugaaccaaaaugcucaagcccugaauacccucguuaagcaacuuagcucaaacuuuggugcgauuuccucaggcccuaaugacauccucucaaggcugccuaaaguggaagcugagguccaaaucgaucgccugauuacgggucgccugcaaucacuccaaacauaugucacccagcaguugaucagagcggccgagauacgggcaucagcaaauuuggcggccacgaaaaugucagagugcguacuuggucaaaguaaaagaguugauuucugcggaaaagguuaccaccuuaugucuuucccccaguccgcuccacauggaguggucuuucugcauuguacuuaugugccagcccaagaaaagaauuuuacuaccgcccccgcuauuugucaugaugguaaggcgcacuuccccagagaaggaguguuuguguccaacgggacucacugguuugugacucaaaggaacuuuuaugaaccucaaauuaucaccacagauaacacauuuguguccgggaauugcgaugugguuaucggcauuguuaauaauaccguuuacgaucccuugcaaccugaguuggauaguuucaaggaagaacuugacaaauacuuuaagaaucacacuuccccggauguagaccucggggacauuuccggaauuaaugcgaguguugugaauauacagaaagagauagaccgacucaacgagguugcuaagaaccucaacgagagccuuaucgaucuucaagaacucggcaaauacgagcaauacauuaaauggccuugguccggcagaaggagacggcgaaggggaaguggcggcagcggcucuggauacaucccggaagcuccacgggaugggcaagcauauguucgcaaggauggagaauggguccuucuuagcaccuucuugggauaauga

SEQ ID NO: 154 - protein, 1274 aa, Artificial Sequence
  Description of Artificial Sequence: Synthetic polypeptide
MDWTWILFLVAAATRVHSMFVFLVLLPLVSSQCVNLTTRTQLPPAYTNSFTRGVYYPDKVFRSSCLHSTQDLFLPFFSNVTWFHAIHVSGTNGTKRFDNPVLPFNDGVYFASTEKSNIIRGWIFGTTLDSKTQSLLIVNNATNVVIKVCEFQFCNDPFLGVYYHKNNKSWMESEFRVYSSANNCTFEYVSQPFLMDLEGKQGNFKNLREFVFKNIDGYFKIYSKHTPINLVRDLPQGFSALEPLVDLPIGINITRFQTLLALHRSYLTPGDSSSGWTAGAAAYYVGYLQPRTFLLKYNENGTITDAVDCALDPLSETKCTLKSFTVEKGIYQTSNFRVQPTESIVRFPNITNLCPFGEVFNATRFASVYAWNRKRISNCVADYSVLYNSASFSTFKCYGVNGTKLNDLCFTNVYADSFVIRGDEVRQIAPGQTGKIADYNYKLPDDFTGCVIAWNSNNLDSKVGGNYNYLYRLFRKSNLKPFERDINTTIYQAGSTPCNGVEGFNCYFPLQSYGFQPTNGVGYQPYRVVVLSFELNHAPATVCGPKKSTNLVKNKCVNFNFNGLTGTGVLTESNKKFLPFQQFGRDCADTTDAVRDPQTLEILDITPCSFGGVSVITPGTNTSNQVAVLYQDVNCTEVPVAIHADQLTPTWRVYSTGSNVFQTRAGCLIGAEHVNNSYECDIPIGAGICASYQTQTNSPRRRRSVASQSIIAYTMSLCAENSVAYSNNSIAIPTNFTISCTTEILPVSMTKTSCDCTMYICGDSTECSNLLLQYGSFCTQLNRALTGIAVEQDKNTQEVFAQVKQCYKTPPIKDFGGFNFSQILPDPSRRRRSFIEDLLFNKVTLADAGFIKQYGDCLGDIAARDLICAQKFNGCTVLPPLLTDEMIAQYTSALLAGTITSGWTFGAGAALQIPFAMQMAYRFNGIGVTQNVLYENQKLIANQFNSAIGKIQDSLSSTASALGKLQDVVNQNAQALNTLVKQLSSNFGAISSGPNDILSRLPKVEAEVQIDRLITGRLQSLQTYVTQQLIRAAEIRASANLAATKMSECVLGQSKRVDFCGKGYHLMSFPQSAPHGVVFLHCTYVPAQEKNFTTAPAICHDGKAHFPREGVFVSNGTHWFVTQRNFYEPQIITTDNTFVSGNCDVVIGIVNNTVYDPLQPELDSFKEELDKYFKNHTSPDVDLGDISGINASVVNIQKEIDRLNEVAKNLNESLIDLQELGKYEQYIKWPWSGRRRRRRGSGGSGSGYIPEAPRDGQAYVRKDGEWVLLSTFLG

SEQ ID NO: 155 - DNA, 3840 bp, Artificial Sequence
  Description of Artificial Sequence: Synthetic polynucleotide
ggatccgccaccatggattggacatggatactgtttctggtcgctgctgccacacgtgtccacagcatgtttgtcttcttggtgctcttgcctcttgtgagctcccaatgtgtgaatctgactacacgtacgcaacttccgcctgcctacaccaactctttcaccagaggcgtgtattatccggataaggtgttcaggagctcctgccttcattcaacacaggatttgtttctgcctttcttttcaaacgttacttggttccatgccatccacgtgtcaggaacaaatggtaccaagagattcgataacccagttctcccttttaatgatggagtctattttgcaagcactgagaaaagtaatattatacgaggttggattttcggaacgacactcgacagtaaaacacaatccctgttgatagtcaacaatgccacgaacgtagttataaaagtttgcgaatttcaattttgcaacgatcctttcctgggtgtgtactatcacaagaacaacaaatcttggatggaaagcgagtttcgagtgtattcttcagcaaacaactgtactttcgaatatgtttctcaaccattcctgatggatctcgaaggtaaacagggcaactttaagaatctgagagagtttgtgtttaagaacattgacggctattttaagatttacagcaaacatacgcctataaaccttgtgagagacctgcctcaagggtttagcgccctggaaccactcgtggacctgcctatcggcatcaatattaccagatttcaaacgctccttgccctgcataggagctatttgacacctggggactcttctagcggctggactgcaggcgctgccgcttattacgtgggatatctccagcctagaactttcctcttgaaatacaacgagaatggaaccataacagacgcagttgattgtgctctcgaccccttgtccgagaccaaatgcacactgaaaagttttaccgtggagaaagggatctatcaaactagtaatttccgcgttcaacccactgagagcatagtgaggtttcctaacattacaaatctttgcccgtttggggaagtgtttaatgccactcgttttgctagtgtatacgcctggaatcgaaagcggatttccaattgcgttgctgactacagtgtactctataatagcgcttcatttagcaccttcaagtgctacggggttaacgggaccaaactcaatgacctctgcttcacgaacgtttacgccgactcctttgtcattcgaggtgacgaagtaagacaaatcgccccaggccagactggaaagatcgcggactacaactataagctgccagacgacttcactggatgtgtgatcgcctggaatagtaacaacctcgactccaaggtgggtggcaattacaattatctctataggctgttcaggaagagtaatttgaaaccattcgagcgcgacataaatacaacaatctaccaagcgggttctaccccttgcaacggcgtggaaggttttaattgttacttccctctccaaagctacgggtttcaaccaacaaacggcgtgggataccaaccatacagggtggttgtgttgagcttcgaattgaatcatgcacctgcaacagtgtgtgggcccaagaagtccaccaatctcgttaagaataaatgcgtgaacttcaactttaacgggttgacagggaccggcgtgcttacggaaagtaataagaaattccttcccttccagcaatttggtcgcgactgtgcggatacaacggacgcagtgcgagacccacagacattggagatcctggacataacaccttgctcttttggcggggtctccgtaataacacctggaacaaataccagcaatcaagtagcggtcttgtatcaagatgtaaactgtactgaagtcccagttgctatacatgcagaccaacttacaccgacgtggcgcgtgtattctacgggctccaacgtattccaaaccagagcagggtgcttgataggggcagagcacgtcaacaatagctatgagtgtgatatcccgataggtgctggaatctgcgcaagttaccagacccaaaccaatagcccccgccggagacgatcagtggcaagccagtctataatagcctacacgatgtcactgtgtgccgaaaatagcgttgcctatagtaacaatagcatcgccattccaaccaatttcacaatatcagtcactactgagattctgcctgtgtcaatgactaaaactagtgtggactgcacaatgtatatttgcggcgattccacagaatgtagcaatcttctgctgcaatatgggagtttctgtacacaattgaatcgggcccttactggaatcgccgtagagcaggacaagaacacccaagaagtctttgcgcaagtcaaacaatgttataagactcccccaattaaagattttggcggctttaattttagccaaatacttcccgaccccagccgccgacgacgctcctttatcgaagatctgttgtttaataaagtcacattggctgatgctggctttatcaaacaatacggtgattgtctgggtgatattgcagcccgagatctgatctgcgcccaaaagtttaacggcttgaccgttctcccgccactcctgacagatgagatgatcgcgcaatatacctctgcactcctggcgggaacaatcactagtggttggactttcggcgccggcgctgcactgcaaattcccttcgccatgcaaatggcctatcggtttaacggaattggtgtgactcagaatgtgctttacgaaaatcagaaactcatagctaatcagtttaacagcgcaatcgggaaaattcaggattccctcagcagcaccgctagcgccttgggcaagctgcaggacgttgtaaaccagaacgctcaggccctcaacactctcgttaaacaattgagctctaactttggggccataagcagtggtcctaacgacatcctgagtcgtctgccaaaggtagaggccgaagtgcaaatcgaccggctcatcactggaagactgcaaagcctgcaaacctatgtcacacagcaacttatacgggccgccgaaatcagggcctcagcaaacctcgcagcaacaaagatgagcgagtgtgtgctgggccaatccaagcgcgtggacttctgtggtaagggataccatctgatgtcctttccccaatccgcgcctcatggagtagttttcctgcacgttacgtatgtgcctgcccaagagaagaactttacaacagcaccagccatttgtcatgacggaaaagcccattttcctagagaaggagtctttgtttccaatgggacacattggtttgttacccagcgtaacttttatgagccacaaatcatcaccacggacaatactttcgtgagcggtaattgtgatgtggtcattggcatagtgaataacactgtttacgaccccctgcaaccggaattggacagcttcaaagaagaactggacaagtacttcaagaaccacacatccccagacgtagacctcggagatatttccggaattaacgcatcagtagttaacatccagaaagaaatagatcgactgaatgaggtcgctaagaacttgaacgaatcacttatagatctccaggaactcggcaaatatgagcaatatattaaatggccctggtcaggtcgcagaagacgccgccggggttccggcggatctggatctggatatattcccgaagctccacgggatgggcaagcctacgtaagaaaggatggagaatgggtacttttgtccacgttcttgggctagtag

SEQ ID NO: 156 - RNA, 3840 nt, Artificial Sequence
  Description of Artificial Sequence: Synthetic polynucleotide
ggauccgccaccauggauuggacauggauacuguuucuggucgcugcugccacacguguccacagcauguuugucuucuuggugcucuugccucuugugagcucccaaugugugaaucugacuacacguacgcaacuuccgccugccuacaccaacucuuucaccagaggcguguauuauccggauaagguguucaggagcuccugccuucauucaacacaggauuuguuucugccuuucuuuucaaacguuacuugguuccaugccauccacgugucaggaacaaaugguaccaagagauucgauaacccaguucucccuuuuaaugauggagucuauuuugcaagcacugagaaaaguaauauuauacgagguuggauuuucggaacgacacucgacaguaaaacacaaucccuguugauagucaacaaugccacgaacguaguuauaaaaguuugcgaauuucaauuuugcaacgauccuuuccuggguguguacuaucacaagaacaacaaaucuuggauggaaagcgaguuucgaguguauucuucagcaaacaacuguacuuucgaauauguuucucaaccauuccugauggaucucgaagguaaacagggcaacuuuaagaaucugagagaguuuguguuuaagaacauugacggcuauuuuaagauuuacagcaaacauacgccuauaaaccuugugagagaccugccucaaggguuuagcgcccuggaaccacucguggaccugccuaucggcaucaauauuaccagauuucaaacgcuccuugcccugcauaggagcuauuugacaccuggggacucuucuagcggcuggacugcaggcgcugccgcuuauuacgugggauaucuccagccuagaacuuuccucuugaaauacaacgagaauggaaccauaacagacgcaguugauugugcucucgaccccuuguccgagaccaaaugcacacugaaaaguuuuaccguggagaaagggaucuaucaaacuaguaauuuccgcguucaacccacugagagcauagugagguuuccuaacauuacaaaucuuugcccguuuggggaaguguuuaaugccacucguuuugcuaguguauacgccuggaaucgaaagcggauuuccaauugcguugcugacuacaguguacucuauaauagcgcuucauuuagcaccuucaagugcuacgggguuaacgggaccaaacucaaugaccucugcuucacgaacguuuacgccgacuccuuugucauucgaggugacgaaguaagacaaaucgccccaggccagacuggaaagaucgcggacuacaacuauaagcugccagacgacuucacuggaugugugaucgccuggaauaguaacaaccucgacuccaagguggguggcaauuacaauuaucucuauaggcuguucaggaagaguaauuugaaaccauucgagcgcgacauaaauacaacaaucuaccaagcggguucuaccccuugcaacggcguggaagguuuuaauuguuacuucccucuccaaagcuacggguuucaaccaacaaacggcgugggauaccaaccauacagggugguuguguugagcuucgaauugaaucaugcaccugcaacagugugugggcccaagaaguccaccaaucucguuaagaauaaaugcgugaacuucaacuuuaacggguugacagggaccggcgugcuuacggaaaguaauaagaaauuccuucccuuccagcaauuuggucgcgacugugcggauacaacggacgcagugcgagacccacagacauuggagauccuggacauaacaccuugcucuuuuggcggggucuccguaauaacaccuggaacaaauaccagcaaucaaguagcggucuuguaucaagauguaaacuguacugaagucccaguugcuauacaugcagaccaacuuacaccgacguggcgcguguauucuacgggcuccaacguauuccaaaccagagcagggugcuugauaggggcagagcacgucaacaauagcuaugagugugauaucccgauaggugcuggaaucugcgcaaguuaccagacccaaaccaauagcccccgccggagacgaucaguggcaagccagucuauaauagccuacacgaugucacugugugccgaaaauagcguugccuauaguaacaauagcaucgccauuccaaccaauuucacaauaucagucacuacugagauucugccugugucaaugacuaaaacuaguguggacugcacaauguauauuugcggcgauuccacagaauguagcaaucuucugcugcaauaugggaguuucuguacacaauugaaucgggcccuuacuggaaucgccguagagcaggacaagaacacccaagaagucuuugcgcaagucaaacaauguuauaagacucccccaauuaaagauuuuggcggcuuuaauuuuagccaaauacuucccgaccccagccgccgacgacgcuccuuuaucgaagaucuguuguuuaauaaagucacauuggcugaugcuggcuuuaucaaacaauacggugauugucugggugauauugcagcccgagaucugaucugcgcccaaaaguuuaacggcuugaccguucucccgccacuccugacagaugagaugaucgcgcaauauaccucugcacuccuggcgggaacaaucacuagugguuggacuuucggcgccggcgcugcacugcaaauucccuucgccaugcaaauggccuaucgguuuaacggaauuggugugacucagaaugugcuuuacgaaaaucagaaacucauagcuaaucaguuuaacagcgcaaucgggaaaauucaggauucccucagcagcaccgcuagcgccuugggcaagcugcaggacguuguaaaccagaacgcucaggcccucaacacucucguuaaacaauugagcucuaacuuuggggccauaagcagugguccuaacgacauccugagucgucugccaaagguagaggccgaagugcaaaucgaccggcucaucacuggaagacugcaaagccugcaaaccuaugucacacagcaacuuauacgggccgccgaaaucagggccucagcaaaccucgcagcaacaaagaugagcgagugugugcugggccaauccaagcgcguggacuucugugguaagggauaccaucugauguccuuuccccaauccgcgccucauggaguaguuuuccugcacguuacguaugugccugcccaagagaagaacuuuacaacagcaccagccauuugucaugacggaaaagcccauuuuccuagagaaggagucuuuguuuccaaugggacacauugguuuguuacccagcguaacuuuuaugagccacaaaucaucaccacggacaauacuuucgugagcgguaauugugauguggucauuggcauagugaauaacacuguuuacgacccccugcaaccggaauuggacagcuucaaagaagaacuggacaaguacuucaagaaccacacauccccagacguagaccucggagauauuuccggaauuaacgcaucaguaguuaacauccagaaagaaauagaucgacugaaugaggucgcuaagaacuugaacgaaucacuuauagaucuccaggaacucggcaaauaugagcaauauauuaaauggcccuggucaggucgcagaagacgccgccgggguuccggcggaucuggaucuggauauauucccgaagcuccacgggaugggcaagccuacguaagaaaggauggagaauggguacuuuuguccacguucuugggcuaguag

SEQ ID NO: 157 - protein, 1274 aa, Artificial Sequence
  Description of Artificial Sequence: Synthetic polypeptide
MDWTWILFLVAAATRVHSMFVFLVLLPLVSSQCVNLTTRTQLPPAYTNSFTRGVYYPDKVFRSSCLHSTQDLFLPFFSNVTWFHAIHVSGTNGTKRFDNPVLPFNDGVYFASTEKSNIIRGWIFGTTLDSKTQSLLIVNNATNVVIKVCEFQFCNDPFLGVYYHKNNKSWMESEFRVYSSANNCTFEYVSQPFLMDLEGKQGNFKNLREFVFKNIDGYFKIYSKHTPINLVRDLPQGFSALEPLVDLPIGINITRFQTLLALHRSYLTPGDSSSGWTAGAAAYYVGYLQPRTFLLKYNENGTITDAVDCALDPLSETKCTLKSFTVEKGIYQTSNFRVQPTESIVRFPNITNLCPFGEVFNATRFASVYAWNRKRISNCVADYSVLYNSASFSTFKCYGVNGTKLNDLCFTNVYADSFVIRGDEVRQIAPGQTGKIADYNYKLPDDFTGCVIAWNSNNLDSKVGGNYNYLYRLFRKSNLKPFERDINTTIYQAGSTPCNGVEGFNCYFPLQSYGFQPTNGVGYQPYRVVVLSFELNHAPATVCGPKKSTNLVKNKCVNFNFNGLTGTGVLTESNKKFLPFQQFGRDCADTTDAVRDPQTLEILDITPCSFGGVSVITPGTNTSNQVAVLYQDVNCTEVPVAIHADQLTPTWRVYSTGSNVFQTRAGCLIGAEHVNNSYECDIPIGAGICASYQTQTNSPRRRRSVASQSIIAYTMSLCAENSVAYSNNSIAIPTNFTISVTTEILPVSMTKTSVDCTMYICGDSTECSNLLLQYGSFCTQLNRALTGIAVEQDKNTQEVFAQVKQCYKTPPIKDFGGFNFSQILPDPSRRRRSFIEDLLFNKVTLADAGFIKQYGDCLGDIAARDLICAQKFNGLTVLPPLLTDEMIAQYTSALLAGTITSGWTFGAGAALQIPFAMQMAYRFNGIGVTQNVLYENQKLIANQFNSAIGKIQDSLSSTASALGKLQDVVNQNAQALNTLVKQLSSNFGAISSGPNDILSRLPKVEAEVQIDRLITGRLQSLQTYVTQQLIRAAEIRASANLAATKMSECVLGQSKRVDFCGKGYHLMSFPQSAPHGVVFLHVTYVPAQEKNFTTAPAICHDGKAHFPREGVFVSNGTHWFVTQRNFYEPQIITTDNTFVSGNCDVVIGIVNNTVYDPLQPELDSFKEELDKYFKNHTSPDVDLGDISGINASVVNIQKEIDRLNEVAKNLNESLIDLQELGKYEQYIKWPWSGRRRRRRGSGGSGSGYIPEAPRDGQAYVRKDGEWVLLSTFLG

SEQ ID NO: 158 - DNA, 3840 bp, Artificial Sequence
  Description of Artificial Sequence: Synthetic polynucleotide
ggatccgccaccatggactggacatggatacttttcttggtggcagctgctacacgcgtccactcaatgttcgtctttctggtgctcttgccactggtgagcagccaatgcgttaacctcaccacacgcacgcagcttccacccgcatacactaactcctttacgcgcggcgtgtactatccagataaagtgttccgaagtagcgtcttgcatagcacccaggatctgtttctcccattctttagcaatgtcacatggttccacgctatccacgtgtctgggacgaatggaactaaacgttttgacaatcctgttcttccttttaacgacggcgtatactttgctagtactgagaagtctaacattatccgcggctggattttcgggacaaccctggactccaaaacccagtctctgctgatagtaaacaatgccaccaacgtcgtcattaaagtgtgcgagtttcaattctgcaacgacccctttctgggtgtctattaccacaagaacaataagtcttggatggagtcagaatttcgtgtctattcttctgccaataattgtacatttgagtatgtttctcaaccctttctcatggacctcgaaggcaagcaggggaattttaagaacctgcgggaattcgtctttaagaatatcgacggctatttcaaaatttacagcaaacacacgcctataaacctcgtgcgagatctcccccaaggcttctcagcattggagccattggtcgacttgccaatcggaattaatatcacaaggtttcagactctgctggccctgcatcgctcctatcttacccctggcgattcctcaagtggctggacggccggcgcagcagcctattacgtcggctatctccagccaaggacgtttcttttgaagtataatgaaaatgggactattactgacgccgtcgactgcgctttggaccccctgagcgagacaaagtgcacattgaaaagcttcacggtggagaagggtatttatcaaacttccaactttagggtgcaaccaacagagagcatcgtgaggttccctaatatcactaatctctgtccatttggcgaggtgtttaacgcgaccagatttgcaagcgtatatgcctggaataggaagagaataagcaattgtgttgccgattactctgtcttgtataacagcgcatctttcagcacttttaagtgctatggtgtcaacgggacaaaacttaacgatctttgcttcaccaacgtttacgcagactcttttgtcatacgcggagatgaggtccgacaaatagctcccggccagactgggaaaatcgctgattataactataagcttccagatgacttcacaggatgcgtaattgcatggaactctaacaacctggactcaaaagttggtggcaactataactatctctatcgtttgttccgaaaatcaaaccttaaaccctttgaacgggatattaatacgacaatttaccaagcagggagcactccttgtaacggtgtagaaggtttcaattgttattttcctctgcaatcatacggattccaaccaacaaacggtgtgggttatcaaccttatcgggttgtagttttgagcttcgagcttaaccatgcacccgccacagtatgcggaccgaagaagagtacaaacctggttaagaataaatgtgtaaacttcaactttaatggactgacggggacgggagtactcactgaaagcaataagaaattcttgccttttcagcaattcgggcgggacatagcggacactacagacgccgtgcgcgacccccagactctcgaaatcctggacataaccccgtgctcatttggcggagtttcagtcatcactccagggaccaatacctcaaaccaagtagctgtgctgtatcaagatgtgaattgcaccgaagtaccagtggccattcacgccgatcagctgaccccgacatggcgggtgtactcaaccggttcaaatgtgtttcaaacaagagcaggttgtcttattggcgctgaacacgtgaataactcctatgaatgcgacatcccaattggtgccggaatctgtgcctcttatcaaacacaaactaattcaccaaggcgtaggcgcagcgtcgcctctcaatcaattatagcctacaccatgtcactgggtgccgaaaactccgtcgcgtacagcaacaatagcattgccatccctaccaacttcaccatcagctgtacaactgagatcctgcctgtatccatgacaaagacatcctgcgattgcactatgtacatctgtggagactctactgagtgtagcaacctcttgctccaatacgggagtttctgtacgcaactcaaccgtgccctcaccggcatagccgtagagcaagataagaatacccaggaagtatttgcccaagtaaagcaaatttataagacgccacccattaaagactttggcggtttcaacttcagtcaaatactgccagacccgtctcgcaggagaaggagttttattgaagacctgctctttaacaaggtgactcttgccgatgctggatttattaaacaatatggggattgtctcggagatatcgctgctcgggatcttatctgcgcgcagaaattcaacgggtgtaccgtgctcccacccttgctcactgacgaaatgatcgcgcaatatacctcagcacttctggcgggaactattacatctggttggacattcggcgcaggggcagctctccaaattcccttcgcaatgcaaatggcttacaggttcaatggcataggtgtcacacaaaacgtgctgtacgagaatcaaaagcttatagccaatcagtttaatagcgccataggcaagatccaagattccctgagctccacggcaagcgctctgggaaaattgcaagacgtagtcaatcaaaacgctcaagcgctgaatacccttgtgaaacaactttcttcaaactttggagctatctcatctgggcccaacgatattctgagtcgactgccaaaggttgaagctgaagtccaaattgatcggttgatcacaggaaggctgcaatccctgcagacttacgtgacccagcaactgatcagggcagccgaaataagggcttccgccaatctggcagccacaaagatgtctgaatgtgtcttgggtcaaagcaaacgcgtcgatttctgtggcaaggggtaccatctgatgtcattccctcaatctgcccctcacggtgtggtatttctccattgcacttatgttcccgcacaggagaagaacttcacaacagctcccgccatttgccacgacggaaaggcgcattttccccgcgaaggtgtcttcgtgtccaatgggactcattggtttgtgactcagaggaatttctatgagccgcagattatcaccaccgacaacactttcgtctccggtaactgcgacgtcgttatcggaatcgtcaataacacagtgtatgatcctctgcagccggagctggactcattcaaagaggagttggataaatattttaagaatcatacaagccccgacgtcgatctgggcgatattagtggtatcaatgcgtccgtggttaacattcagaaagagattgacagactcaatgaggtcgccaagaacttgaacgaatccttgattgatctccaggagttgggcaagtatgagcaatatatcaagtggccatggtctgggcgaaggcgccgtcgcagagggtccggcggtagtggttccgggtacataccagaagctccacgagatggtcaagcttatgtaaggaaagacggagagtgggtcctgcttagcacattcttgggttgataa

SEQ ID NO: 159 - RNA, 3840 nt, Artificial Sequence
  Description of Artificial Sequence: Synthetic polynucleotide
ggauccgccaccauggacuggacauggauacuuuucuugguggcagcugcuacacgcguccacucaauguucgucuuucuggugcucuugccacuggugagcagccaaugcguuaaccucaccacacgcacgcagcuuccacccgcauacacuaacuccuuuacgcgcggcguguacuauccagauaaaguguuccgaaguagcgucuugcauagcacccaggaucuguuucucccauucuuuagcaaugucacaugguuccacgcuauccacgugucugggacgaauggaacuaaacguuuugacaauccuguucuuccuuuuaacgacggcguauacuuugcuaguacugagaagucuaacauuauccgcggcuggauuuucgggacaacccuggacuccaaaacccagucucugcugauaguaaacaaugccaccaacgucgucauuaaagugugcgaguuucaauucugcaacgaccccuuucugggugucuauuaccacaagaacaauaagucuuggauggagucagaauuucgugucuauucuucugccaauaauuguacauuugaguauguuucucaacccuuucucauggaccucgaaggcaagcaggggaauuuuaagaaccugcgggaauucgucuuuaagaauaucgacggcuauuucaaaauuuacagcaaacacacgccuauaaaccucgugcgagaucucccccaaggcuucucagcauuggagccauuggucgacuugccaaucggaauuaauaucacaagguuucagacucugcuggcccugcaucgcuccuaucuuaccccuggcgauuccucaaguggcuggacggccggcgcagcagccuauuacgucggcuaucuccagccaaggacguuucuuuugaaguauaaugaaaaugggacuauuacugacgccgucgacugcgcuuuggacccccugagcgagacaaagugcacauugaaaagcuucacgguggagaaggguauuuaucaaacuuccaacuuuagggugcaaccaacagagagcaucgugagguucccuaauaucacuaaucucuguccauuuggcgagguguuuaacgcgaccagauuugcaagcguauaugccuggaauaggaagagaauaagcaauuguguugccgauuacucugucuuguauaacagcgcaucuuucagcacuuuuaagugcuauggugucaacgggacaaaacuuaacgaucuuugcuucaccaacguuuacgcagacucuuuugucauacgcggagaugagguccgacaaauagcucccggccagacugggaaaaucgcugauuauaacuauaagcuuccagaugacuucacaggaugcguaauugcauggaacucuaacaaccuggacucaaaaguugguggcaacuauaacuaucucuaucguuuguuccgaaaaucaaaccuuaaacccuuugaacgggauauuaauacgacaauuuaccaagcagggagcacuccuuguaacgguguagaagguuucaauuguuauuuuccucugcaaucauacggauuccaaccaacaaacgguguggguuaucaaccuuaucggguuguaguuuugagcuucgagcuuaaccaugcacccgccacaguaugcggaccgaagaagaguacaaaccugguuaagaauaaauguguaaacuucaacuuuaauggacugacggggacgggaguacucacugaaagcaauaagaaauucuugccuuuucagcaauucgggcgggacauagcggacacuacagacgccgugcgcgacccccagacucucgaaauccuggacauaaccccgugcucauuuggcggaguuucagucaucacuccagggaccaauaccucaaaccaaguagcugugcuguaucaagaugugaauugcaccgaaguaccaguggccauucacgccgaucagcugaccccgacauggcggguguacucaaccgguucaaauguguuucaaacaagagcagguugucuuauuggcgcugaacacgugaauaacuccuaugaaugcgacaucccaauuggugccggaaucugugccucuuaucaaacacaaacuaauucaccaaggcguaggcgcagcgucgccucucaaucaauuauagccuacaccaugucacugggugccgaaaacuccgucgcguacagcaacaauagcauugccaucccuaccaacuucaccaucagcuguacaacugagauccugccuguauccaugacaaagacauccugcgauugcacuauguacaucuguggagacucuacugaguguagcaaccucuugcuccaauacgggaguuucuguacgcaacucaaccgugcccucaccggcauagccguagagcaagauaagaauacccaggaaguauuugcccaaguaaagcaaauuuauaagacgccacccauuaaagacuuuggcgguuucaacuucagucaaauacugccagacccgucucgcaggagaaggaguuuuauugaagaccugcucuuuaacaaggugacucuugccgaugcuggauuuauuaaacaauauggggauugucucggagauaucgcugcucgggaucuuaucugcgcgcagaaauucaacggguguaccgugcucccacccuugcucacugacgaaaugaucgcgcaauauaccucagcacuucuggcgggaacuauuacaucugguuggacauucggcgcaggggcagcucuccaaauucccuucgcaaugcaaauggcuuacagguucaauggcauaggugucacacaaaacgugcuguacgagaaucaaaagcuuauagccaaucaguuuaauagcgccauaggcaagauccaagauucccugagcuccacggcaagcgcucugggaaaauugcaagacguagucaaucaaaacgcucaagcgcugaauacccuugugaaacaacuuucuucaaacuuuggagcuaucucaucugggcccaacgauauucugagucgacugccaaagguugaagcugaaguccaaauugaucgguugaucacaggaaggcugcaaucccugcagacuuacgugacccagcaacugaucagggcagccgaaauaagggcuuccgccaaucuggcagccacaaagaugucugaaugugucuugggucaaagcaaacgcgucgauuucuguggcaagggguaccaucugaugucauucccucaaucugccccucacggugugguauuucuccauugcacuuauguucccgcacaggagaagaacuucacaacagcucccgccauuugccacgacggaaaggcgcauuuuccccgcgaaggugucuucguguccaaugggacucauugguuugugacucagaggaauuucuaugagccgcagauuaucaccaccgacaacacuuucgucuccgguaacugcgacgucguuaucggaaucgucaauaacacaguguaugauccucugcagccggagcuggacucauucaaagaggaguuggauaaauauuuuaagaaucauacaagccccgacgucgaucugggcgauauuagugguaucaaugcguccgugguuaacauucagaaagagauugacagacucaaugaggucgccaagaacuugaacgaauccuugauugaucuccaggaguugggcaaguaugagcaauauaucaaguggccauggucugggcgaaggcgccgucgcagaggguccggcgguagugguuccggguacauaccagaagcuccacgagauggucaagcuuauguaaggaaagacggagaguggguccugcuuagcacauucuuggguugauaa

SEQ ID NO: 160 - protein, 1274 aa, Artificial Sequence
  Description of Artificial Sequence: Synthetic polypeptide
MDWTWILFLVAAATRVHSMFVFLVLLPLVSSQCVNLTTRTQLPPAYTNSFTRGVYYPDKVFRSSVLHSTQDLFLPFFSNVTWFHAIHVSGTNGTKRFDNPVLPFNDGVYFASTEKSNIIRGWIFGTTLDSKTQSLLIVNNATNVVIKVCEFQFCNDPFLGVYYHKNNKSWMESEFRVYSSANNCTFEYVSQPFLMDLEGKQGNFKNLREFVFKNIDGYFKIYSKHTPINLVRDLPQGFSALEPLVDLPIGINITRFQTLLALHRSYLTPGDSSSGWTAGAAAYYVGYLQPRTFLLKYNENGTITDAVDCALDPLSETKCTLKSFTVEKGIYQTSNFRVQPTESIVRFPNITNLCPFGEVFNATRFASVYAWNRKRISNCVADYSVLYNSASFSTFKCYGVNGTKLNDLCFTNVYADSFVIRGDEVRQIAPGQTGKIADYNYKLPDDFTGCVIAWNSNNLDSKVGGNYNYLYRLFRKSNLKPFERDINTTIYQAGSTPCNGVEGFNCYFPLQSYGFQPTNGVGYQPYRVVVLSFELNHAPATVCGPKKSTNLVKNKCVNFNFNGLTGTGVLTESNKKFLPFQQFGRDIADTTDAVRDPQTLEILDITPCSFGGVSVITPGTNTSNQVAVLYQDVNCTEVPVAIHADQLTPTWRVYSTGSNVFQTRAGCLIGAEHVNNSYECDIPIGAGICASYQTQTNSPRRRRSVASQSIIAYTMSLGAENSVAYSNNSIAIPTNFTISCTTEILPVSMTKTSCDCTMYICGDSTECSNLLLQYGSFCTQLNRALTGIAVEQDKNTQEVFAQVKQIYKTPPIKDFGGFNFSQILPDPSRRRRSFIEDLLFNKVTLADAGFIKQYGDCLGDIAARDLICAQKFNGCTVLPPLLTDEMIAQYTSALLAGTITSGWTFGAGAALQIPFAMQMAYRFNGIGVTQNVLYENQKLIANQFNSAIGKIQDSLSSTASALGKLQDVVNQNAQALNTLVKQLSSNFGAISSGPNDILSRLPKVEAEVQIDRLITGRLQSLQTYVTQQLIRAAEIRASANLAATKMSECVLGQSKRVDFCGKGYHLMSFPQSAPHGVVFLHCTYVPAQEKNFTTAPAICHDGKAHFPREGVFVSNGTHWFVTQRNFYEPQIITTDNTFVSGNCDVVIGIVNNTVYDPLQPELDSFKEELDKYFKNHTSPDVDLGDISGINASVVNIQKEIDRLNEVAKNLNESLIDLQELGKYEQYIKWPWSGRRRRRRGSGGSGSGYIPEAPRDGQAYVRKDGEWVLLSTFLG

SEQ ID NO: 161 - DNA, 2999 bp, Artificial Sequence
  Description of Artificial Sequence: Synthetic polynucleotide
gactcttcgcgatgtacgggccagatatacgcgttgacattgattattgactagttattaatagtaatcaattacggggtcattagttcatagcccatatatggagttccgcgttacataacttacggtaaatggcccgcctggctgaccgcccaacgacccccgcccattgacgtcaataatgacgtatgttcccatagtaacgccaatagggactttccattgacgtcaatgggtggactatttacggtaaactgcccacttggcagtacatcaagtgtatcatatgccaagtacgccccctattgacgtcaatgacggtaaatggcccgcctggcattatgcccagtacatgaccttatgggactttcctacttggcagtacatctacgtattagtcatcgctattaccatggtgatgcggttttggcagtacatcaatgggcgtggatagcggtttgactcacggggatttccaagtctccaccccattgacgtcaatgggagtttgttttggcaccaaaatcaacgggactttccaaaatgtcgtaacaactccgccccattgacgcaaatgggcggtaggcgtgtacggtgggaggtctatataagcagagctctctggctaactagagaacccactgcttactggcttatcgaaattaatacgactcactatagggagacccaagctggctagcgtttaaacttaagcttggtaccgagctcggatccactagtccagtgtggtggaattctgcagatatccagcacagtggcggccgctcgagtctagagggcccgtttaaacccgctgatcagcctcgactgtgccttctagttgccagccatctgttgtttgcccctcccccgtgccttccttgaccctggaaggtgccactcccactgtcctttcctaataaaatgaggaaattgcatcgcattgtctgagtaggtgtcattctattctggggggtggggtggggcaggacagcaagggggaggattgggaagacaatagcaggcatgctggggatgcggtgggctctatggcttctactgggcggttttatggacagcaagcgaaccggaattgccagctggggcgccctctggtaaggttgggaagccctgcaaagtaaactggatggctttctcgccgccaaggatctgatggcgcaggggatcaagctctgatcaagagacaggatgaggatcgtttcgcatgattgaacaagatggattgcacgcaggttctccggccgcttgggtggagaggctattcggctatgactgggcacaacagacaatcggctgctctgatgccgccgtgttccggctgtcagcgcaggggcgcccggttctttttgtcaagaccgacctgtccggtgccctgaatgaactgcaagacgaggcagcgcggctatcgtggctggccacgacgggcgttccttgcgcagctgtgctcgacgttgtcactgaagcgggaagggactggctgctattgggcgaagtgccggggcaggatctcctgtcatctcaccttgctcctgccgagaaagtatccatcatggctgatgcaatgcggcggctgcatacgcttgatccggctacctgcccattcgaccaccaagcgaaacatcgcatcgagcgagcacgtactcggatggaagccggtcttgtcgatcaggatgatctggacgaagagcatcaggggctcgcgccagccgaactgttcgccaggctcaaggcgagcatgcccgacggcgaggatctcgtcgtgacccatggcgatgcctgcttgccgaatatcatggtggaaaatggccgcttttctggattcatcgactgtggccggctgggtgtggcggaccgctatcaggacatagcgttggctacccgtgatattgctgaagagcttggcggcgaatgggctgaccgcttcctcgtgctttacggtatcgccgctcccgattcgcagcgcatcgccttctatcgccttcttgacgagttcttctgaattattaacgcttacaatttcctgatgcggtattttctccttacgcatctgtgcggtatttcacaccgcatacaggtggcacttttcggggaaatgtgcgcggaacccctatttgtttatttttctaaatacattcaaatatgtatccgctcatgagacaataaccctgataaatgcttcaataatagcacgtgctaaaacttcatttttaatttaaaaggatctaggtgaagatcctttttgataatctcatgaccaaaatcccttaacgtgagttttcgttccactgagcgtcagaccccgtagaaaagatcaaaggatcttcttgagatcctttttttctgcgcgtaatctgctgcttgcaaacaaaaaaaccaccgctaccagcggtggtttgtttgccggatcaagagctaccaactctttttccgaaggtaactggcttcagcagagcgcagataccaaatactgtccttctagtgtagccgtagttaggccaccacttcaagaactctgtagcaccgcctacatacctcgctctgctaatcctgttaccagtggctgctgccagtggcgataagtcgtgtcttaccgggttggactcaagacgatagttaccggataaggcgcagcggtcgggctgaacggggggttcgtgcacacagcccagcttggagcgaacgacctacaccgaactgagatacctacagcgtgagctatgagaaagcgccacgcttcccgaagggagaaaggcggacaggtatccggtaagcggcagggtcggaacaggagagcgcacgagggagcttccagggggaaacgcctggtatctttatagtcctgtcgggtttcgccacctctgacttgagcgtcgatttttgtgatgctcgtcaggggggcggagcctatggaaaaacgccagcaacgcggcctttttacggttcctgggcttttgctggccttttgctcacatgttctt

SEQ ID NO: 162 - DNA, 5428 bp, Artificial Sequence
  Description of Artificial Sequence: Synthetic polynucleotide
gacggatcgggagatctcccgatcccctatggtgcactctcagtacaatctgctctgatgccgcatagttaagccagtatctgctccctgcttgtgtgttggaggtcgctgagtagtgcgcgagcaaaatttaagctacaacaaggcaaggcttgaccgacaattgcatgaagaatctgcttagggttaggcgttttgcgctgcttcgcgatgtacgggccagatatacgcgttgacattgattattgactagttattaatagtaatcaattacggggtcattagttcatagcccatatatggagttccgcgttacataacttacggtaaatggcccgcctggctgaccgcccaacgacccccgcccattgacgtcaataatgacgtatgttcccatagtaacgccaatagggactttccattgacgtcaatgggtggagtatttacggtaaactgcccacttggcagtacatcaagtgtatcatatgccaagtacgccccctattgacgtcaatgacggtaaatggcccgcctggcattatgcccagtacatgaccttatgggactttcctacttggcagtacatctacgtattagtcatcgctattaccatggtgatgcggttttggcagtacatcaatgggcgtggatagcggtttgactcacggggatttccaagtctccaccccattgacgtcaatgggagtttgttttggcaccaaaatcaacgggactttccaaaatgtcgtaacaactccgccccattgacgcaaatgggcggtaggcgtgtacggtgggaggtctatataagcagagctctctggctaactagagaacccactgcttactggcttatcgaaattaatacgactcactatagggagacccaagctggctagcgtttaaacttaagcttggtaccgagctcggatccactagtccagtgtggtggaattctgcagatatccagcacagtggcggccgctcgagtctagagggcccgtttaaacccgctgatcagcctcgactgtgccttctagttgccagccatctgttgtttgcccctcccccgtgccttccttgaccctggaaggtgccactcccactgtcctttcctaataaaatgaggaaattgcatcgcattgtctgagtaggtgtcattctattctggggggtggggtggggcaggacagcaagggggaggattgggaagacaatagcaggcatgctggggatgcggtgggctctatggcttctgaggcggaaagaaccagctggggctctagggggtatccccacgcgccctgtagcggcgcattaagcgcggcgggtgtggtggttacgcgcagcgtgaccgctacacttgccagcgccctagcgcccgctcctttcgctttcttcccttcctttctcgccacgttcgccggctttccccgtcaagctctaaatcgggggctccctttagggttccgatttagtgctttacggcacctcgaccccaaaaaacttgattagggtgatggttcacgtagtgggccatcgccctgatagacggtttttcgccctttgacgttggagtccacgttctttaatagtggactcttgttccaaactggaacaacactcaaccctatctcggtctattcttttgatttataagggattttgccgatttcggcctattggttaaaaaatgagctgatttaacaaaaatttaacgcgaattaattctgtggaatgtgtgtcagttagggtgtggaaagtccccaggctccccagcaggcagaagtatgcaaagcatgcatctcaattagtcagcaaccaggtgtggaaagtccccaggctccccagcaggcagaagtatgcaaagcatgcatctcaattagtcagcaaccatagtcccgcccctaactccgcccatcccgcccctaactccgcccagttccgcccattctccgccccatggctgactaattttttttatttatgcagaggccgaggccgcctctgcctctgagctattccagaagtagtgaggaggcttttttggaggcctaggcttttgcaaaaagctcccgggagcttgtatatccattttcggatctgatcaagagacaggatgaggatcgtttcgcatgattgaacaagatggattgcacgcaggttctccggccgcttgggtggagaggctattcggctatgactgggcacaacagacaatcggctgctctgatgccgccgtgttccggctgtcagcgcaggggcgcccggttctttttgtcaagaccgacctgtccggtgccctgaatgaactgcaggacgaggcagcgcggctatcgtggctggccacgacgggcgttccttgcgcagctgtgctcgacgttgtcactgaagcgggaagggactggctgctattgggcgaagtgccggggcaggatctcctgtcatctcaccttgctcctgccgagaaagtatccatcatggctgatgcaatgcggcggctgcatacgcttgatccggctacctgcccattcgaccaccaagcgaaacatcgcatcgagcgagcacgtactcggatggaagccggtcttgtcgatcaggatgatctggacgaagagcatcaggggctcgcgccagccgaactgttcgccaggctcaaggcgcgcatgcccgacggcgaggatctcgtcgtgacccatggcgatgcctgcttgccgaatatcatggtggaaaatggccgcttttctggattcatcgactgtggccggctgggtgtggcggaccgctatcaggacatagcgttggctacccgtgatattgctgaagagcttggcggcgaatgggctgaccgcttcctcgtgctttacggtatcgccgctcccgattcgcagcgcatcgccttctatcgccttcttgacgagttcttctgagcgggactctggggttcgaaatgaccgaccaagcgacgcccaacctgccatcacgagatttcgattccaccgccgccttctatgaaaggttgggcttcggaatcgttttccgggacgccggctggatgatcctccagcgcggggatctcatgctggagttcttcgcccaccccaacttgtttattgcagcttataatggttacaaataaagcaatagcatcacaaatttcacaaataaagcatttttttcactgcattctagttgtggtttgtccaaactcatcaatgtatcttatcatgtctgtataccgtcgacctctagctagagcttggcgtaatcatggtcatagctgtttcctgtgtgaaattgttatccgctcacaattccacacaacatacgagccggaagcataaagtgtaaagcctggggtgcctaatgagtgagctaactcacattaattgcgttgcgctcactgcccgctttccagtcgggaaacctgtcgtgccagctgcattaatgaatcggccaacgcgcggggagaggcggtttgcgtattgggcgctcttccgcttcctcgctcactgactcgctgcgctcggtcgttcggctgcggcgagcggtatcagctcactcaaaggcggtaatacggttatccacagaatcaggggataacgcaggaaagaacatgtgagcaaaaggccagcaaaaggccaggaaccgtaaaaaggccgcgttgctggcgtttttccataggctccgcccccctgacgagcatcacaaaaatcgacgctcaagtcagaggtggcgaaacccgacaggactataaagataccaggcgtttccccctggaagctccctcgtgcgctctcctgttccgaccctgccgcttaccggatacctgtccgcctttctcccttcgggaagcgtggcgctttctcatagctcacgctgtaggtatctcagttcggtgtaggtcgttcgctccaagctgggctgtgtgcacgaaccccccgttcagcccgaccgctgcgccttatccggtaactatcgtcttgagtccaacccggtaagacacgacttatcgccactggcagcagccactggtaacaggattagcagagcgaggtatgtaggcggtgctacagagttcttgaagtggtggcctaactacggctacactagaagaacagtatttggtatctgcgctctgctgaagccagttaccttcggaaaaagagttggtagctcttgatccggcaaacaaaccaccgctggtagcggtttttttgtttgcaagcagcagattacgcgcagaaaaaaaggatctcaagaagatcctttgatcttttctacggggtctgacgctcagtggaacgaaaactcacgttaagggattttggtcatgagattatcaaaaaggatcttcacctagatccttttaaattaaaaatgaagttttaaatcaatctaaagtatatatgagtaaacttggtctgacagttaccaatgcttaatcagtgaggcacctatctcagcgatctgtctatttcgttcatccatagttgcctgactccccgtcgtgtagataactacgatacgggagggcttaccatctggccccagtgctgcaatgataccgcgagacccacgctcaccggctccagatttatcagcaataaaccagccagccggaagggccgagcgcagaagtggtcctgcaactttatccgcctccatccagtctattaattgttgccgggaagctagagtaagtagttcgccagttaatagtttgcgcaacgttgttgccattgctacaggcatcgtggtgtcacgctcgtcgtttggtatggcttcattcagctccggttcccaacgatcaaggcgagttacatgatcccccatgttgtgcaaaaaagcggttagctccttcggtcctccgatcgttgtcagaagtaagttggccgcagtgttatcactcatggttatggcagcactgcataattctcttactgtcatgccatccgtaagatgcttttctgtgactggtgagtactcaaccaagtcattctgagaatagtgtatgcggcgaccgagttgctcttgcccggcgtcaatacgggataataccgcgccacatagcagaactttaaaagtgctcatcattggaaaacgttcttcggggcgaaaactctcaaggatcttaccgctgttgagatccagttcgatgtaacccactcgtgcacccaactgatcttcagcatcttttactttcaccagcgtttctgggtgagcaaaaacaggaaggcaaaatgccgcaaaaaagggaataagggcgacacggaaatgttgaatactcatactcttcctttttcaatattattgaagcatttatcagggttattgtctcatgagcggatacatatttgaatgtatttagaaaaataaacaaataggggttccgcgcacatttccccgaaaagtgccacctgacgtc

SEQ ID NO: 163 - DNA, 4006 bp, Artificial Sequence
  Description of Artificial Sequence: Synthetic polynucleotide
tcaatattggccattagccatattattcattggttatatagcataaatcaatattggctattggccattgcatacgttgtatctatatcataatatgtacatttatattggctcatgtccaatatgaccgccatgttggcattgattattgactagttattaatagtaatcaattacggggtcattagttcatagcccatatatggagttccgcgttacataacttacggtaaatggcccgcctggctgaccgcccaacgacccccgcccattgacgtcaataatgacgtatgttcccatagtaacgccaatagggactttccattgacgtcaatgggtggagtatttacggtaaactgcccacttggcagtacatcaagtgtatcatatgccaagtccgccccctattgacgtcaatgacggtaaatggcccgcctggcattatgcccagtacatgaccttacgggactttcctacttggcagtacatctacgtattagtcatcgctattaccatggtgatgcggttttggcagtacaccaatgggcgtggatagcggtttgactcacggggatttccaagtctccaccccattgacgtcaatgggagtttgttttggcaccaaaatcaacgggactttccaaaatgtcgtaataaccccgccccgttgacgcaaatgggcggtaggcgtgtacggtgggaggtctatataagcagagctcgtttagtgaaccgtcagatcactagaagctttattgcggtagtttatcacagttaaattgctaacgcagtcagtgcttctgacacaacagtctcgaacttaagctgcagaagttggtcgtgaggcactgggcaggtaagtatcaaggttacaagacaggtttaaggagaccaatagaaactgggcttgtcgagacagagaagactcttgcgtttctgataggcacctattggtcttactgacatccactttgcctttctctccacaggtgtccactcccagttcaattacagctcttaaggctagagtacttaatacgactcactataggctagcctcgagaattcacgcgtggtacctctagagtcgacccgggcggccgcttcgagcagacatgataagatacattgatgagtttggacaaaccacaactagaatgcagtgaaaaaaatgctttatttgtgaaatttgtgatgctattgctttatttgtaaccattataagctgcaataaacaagttaacaacaacaattgcattcattttatgtttcaggttcagggggagatgtgggaggttttttaaagcaagtaaaacctctacaaatgtggtaaaatcgataaggatccgggctggcgtaatagcgaagaggcccgcaccgatcgcccttcccaacagttgcgcagcctgaatggcgaatggacgcgccctgtagcggcgcattaagcgcggcgggtgtggtggttacgcgcagcgtgaccgctacacttgccagcgccctagcgcccgctcctttcgctttcttcccttcctttctcgccacgttcgccggctttccccgtcaagctctaaatcgggggctccctttagggttccgatttagtgctttacggcacctcgaccccaaaaaacttgattagggtgatggttcacgtagtgggccatcgccctgatagacggtttttcgccctttgacgttggagtccacgttctttaatagtggactcttgttccaaactggaacaacactcaaccctatctcggtctattcttttgatttataagggattttgccgatttcggcctattggttaaaaaatgagctgatttaacaaaaatttaacgcgaattttaacaaaatattaacgcttacaatttcctgatgcggtattttctccttacgcatctgtgcggtatttcacaccgcatatggtgcactctcagtacaatctgctctgatgccgcatagttaagccagccccgacacccgccaacacccgctgacgcgccctgacgggcttgtctgctcccggcatccgcttacagacaagctgtgaccgtctccgggagctgcatgtgtcagaggttttcaccgtcatcaccgaaacgcgcgagacgaaagggcctcgtgatacgcctatttttataggttaatgtcatgataataatggtttcttagacgtcaggtggcacttttcggggaaatgtgcgcggaacccctatttgtttatttttctaaatacattcaaatatgtatccgctcatgagacaataaccctgataaatgcttcaataatattgaaaaaggaagagtatgagtattcaacatttccgtgtcgcccttattcccttttttgcggcattttgccttcctgtttttgctcacccagaaacgctggtgaaagtaaaagatgctgaagatcagttgggtgcacgagtgggttacatcgaactggatctcaacagcggtaagatccttgagagttttcgccccgaagaacgttttccaatgatgagcacttttaaagttctgctatgtggcgcggtattatcccgtattgacgccgggcaagagcaactcggtcgccgcatacactattctcagaatgacttggttgagtactcaccagtcacagaaaagcatcttacggatggcatgacagtaagagaattatgcagtgctgccataaccatgagtgataacactgcggccaacttacttctgacaacgatcggaggaccgaaggagctaaccgcttttttgcacaacatgggggatcatgtaactcgccttgatcgttgggaaccggagctgaatgaagccataccaaacgacgagcgtgacaccacgatgcctgtagcaatggcaacaacgttgcgcaaactattaactggcgaactacttactctagcttcccggcaacaattaatagactggatggaggcggataaagttgcaggaccacttctgcgctcggcccttccggctggctggtttattgctgataaatctggagccggtgagcgtgggtctcgcggtatcattgcagcactggggccagatggtaagccctcccgtatcgtagttatctacacgacggggagtcaggcaactatggatgaacgaaatagacagatcgctgagataggtgcctcactgattaagcattggtaactgtcagaccaagtttactcatatatactttagattgatttaaaacttcatttttaatttaaaaggatctaggtgaagatcctttttgataatctcatgaccaaaatcccttaacgtgagttttcgttccactgagcgtcagaccccgtagaaaagatcaaaggatcttcttgagatcctttttttctgcgcgtaatctgctgcttgcaaacaaaaaaaccaccgctaccagcggtggtttgtttgccggatcaagagctaccaactctttttccgaaggtaactggcttcagcagagcgcagataccaaatactgttcttctagtgtagccgtagttaggccaccacttcaagaactctgtagcaccgcctacatacctcgctctgctaatcctgttaccagtggctgctgccagtggcgataagtcgtgtcttaccgggttggactcaagacgatagttaccggataaggcgcagcggtcgggctgaacggggggttcgtgcacacagcccagcttggagcgaacgacctacaccgaactgagatacctacagcgtgagctatgagaaagcgccacgcttcccgaagggagaaaggcggacaggtatccggtaagcggcagggtcggaacaggagagcgcacgagggagcttccagggggaaacgcctggtatctttatagtcctgtcgggtttcgccacctctgacttgagcgtcgatttttgtgatgctcgtcaggggggcggagcctatggaaaaacgccagcaacgcggcctttttacggttcctggccttttgctggccttttgctcacatggctcgacagatct

SEQ ID NO: 164 - DNA, 3632 bp, Artificial Sequence
  Description of Artificial Sequence: Synthetic polynucleotide
gcgcagcaccatggcctgaaataacctctgaaagaggaacttggttaggtaccttctgaggcggaaagaaccagctgtggaatgtgtgtcagttagggtgtggaaagtccccaggctccccagcaggcagaagtatgcaaagcatgcatctcaattagtcagcaaccaggtgtggaaagtccccaggctccccagcaggcagaagtatgcaaagcatgcatctcaattagtcagcaaccatagtcccgcccctaactccgcccatcccgcccctaactccgcccagttccgcccattctccgccccatggctgactaattttttttatttatgcagaggccgaggccgcctcggcctctgagctattccagaagtagtgaggaggcttttttggaggcctaggcttttgcaaaaagcttgattcttctgacacaacagtctcgaacttaagctgcagaagttggtcgtgaggcactgggcaggtaagtatcaaggttacaagacaggtttaaggagaccaatagaaactgggcttgtcgagacagagaagactcttgcgtttctgataggcacctattggtcttactgacatccactttgcctttctctccacaggtgtccactcccagttcaattacagctcttaaggctagagtacttaatacgactcactataggctagcctcgagaattcacgcgtggtacctctagagtcgacccgggcggccgcttcgagcagacatgataagatacattgatgagtttggacaaaccacaactagaatgcagtgaaaaaaatgctttatttgtgaaatttgtgatgctattgctttatttgtaaccattataagctgcaataaacaagttaacaacaacaattgcattcattttatgtttcaggttcagggggaggtgtgggaggttttttaaagcaagtaaaacctctacaaatgtggtaaaatcgataaggatccgggctggcgtaatagcgaagaggcccgcaccgatcgcccttcccaacagttgcgcagcctgaatggcgaatggacgcgccctgtagcggcgcattaagcgcggcgggtgtggtggttacgcgcagcgtgaccgctacacttgccagcgccctagcgcccgctcctttcgctttcttcccttcctttctcgccacgttcgccggctttccccgtcaagctctaaatcgggggctccctttagggttccgatttagtgctttacggcacctcgaccccaaaaaacttgattagggtgatggttcacgtagtgggccatcgccctgatagacggtttttcgccctttgacgttggagtccacgttctttaatagtggactcttgttccaaactggaacaacactcaaccctatctcggtctattcttttgatttataagggattttgccgatttcggcctattggttaaaaaatgagctgatttaacaaaaatttaacgcgaattttaacaaaatattaacgcttacaatttcctgatgcggtattttctccttacgcatctgtgcggtatttcacaccgcatatggtgcactctcagtacaatctgctctgatgccgcatagttaagccagccccgacacccgccaacacccgctgacgcgccctgacgggcttgtctgctcccggcatccgcttacagacaagctgtgaccgtctccgggagctgcatgtgtcagaggttttcaccgtcatcaccgaaacgcgcgagacgaaagggcctcgtgatacgcctatttttataggttaatgtcatgataataatggtttcttagacgtcaggtggcacttttcggggaaatgtgcgcggaacccctatttgtttatttttctaaatacattcaaatatgtatccgctcatgagacaataaccctgataaatgcttcaataatattgaaaaaggaagagtatgagtattcaacatttccgtgtcgcccttattcccttttttgcggcattttgccttcctgtttttgctcacccagaaacgctggtgaaagtaaaagatgctgaagatcagttgggtgcacgagtgggttacatcgaactggatctcaacagcggtaagatccttgagagttttcgccccgaagaacgttttccaatgatgagcacttttaaagttctgctatgtggcgcggtattatcccgtattgacgccgggcaagagcaactcggtcgccgcatacactattctcagaatgacttggttgagtactcaccagtcacagaaaagcatcttacggatggcatgacagtaagagaattatgcagtgctgccataaccatgagtgataacactgcggccaacttacttctgacaacgatcggaggaccgaaggagctaaccgcttttttgcacaacatgggggatcatgtaactcgccttgatcgttgggaaccggagctgaatgaagccataccaaacgacgagcgtgacaccacgatgcctgtagcaatggcaacaacgttgcgcaaactattaactggcgaactacttactctagcttcccggcaacaattaatagactggatggaggcggataaagttgcaggaccacttctgcgctcggcccttccggctggctggtttattgctgataaatctggagccggtgagcgtgggtctcgcggtatcattgcagcactggggccagatggtaagccctcccgtatcgtagttatctacacgacggggagtcaggcaactatggatgaacgaaatagacagatcgctgagataggtgcctcactgattaagcattggtaactgtcagaccaagtttactcatatatactttagattgatttaaaacttcatttttaatttaaaaggatctaggtgaagatcctttttgataatctcatgaccaaaatcccttaacgtgagttttcgttccactgagcgtcagaccccgtagaaaagatcaaaggatcttcttgagatcctttttttctgcgcgtaatctgctgcttgcaaacaaaaaaaccaccgctaccagcggtggtttgtttgccggatcaagagctaccaactctttttccgaaggtaactggcttcagcagagcgcagataccaaatactgttcttctagtgtagccgtagttaggccaccacttcaagaactctgtagcaccgcctacatacctcgctctgctaatcctgttaccagtggctgctgccagtggcgataagtcgtgtcttaccgggttggactcaagacgatagttaccggataaggcgcagcggtcgggctgaacggggggttcgtgcacacagcccagcttggagcgaacgacctacaccgaactgagatacctacagcgtgagctatgagaaagcgccacgcttcccgaagggagaaaggcggacaggtatccggtaagcggcagggtcggaacaggagagcgcacgagggagcttccagggggaaacgcctggtatctttatagtcctgtcgggtttcgccacctctgacttgagcgtcgatttttgtgatgctcgtcaggggggcggagcctatggaaaaacgccagcaacgcggcctttttacggttcctggccttttgctggccttttgctcacatggctcgacagatct

SEQ ID NO: 165 - DNA, 3515 bp, Artificial Sequence
  Description of Artificial Sequence: Synthetic polynucleotide
ggatcgatccggctgtggaatgtgtgtcagttagggtgtggaaagtccccaggctccccagcaggcagaagtatgcaaagcatgcatctcaattagtcagcaaccaggtgtggaaagtccccaggctccccagcaggcagaagtatgcaaagcatgcatctcaattagtcagcaaccatagtcccgcccctaactccgcccatcccgcccctaactccgcccagttccgcccattctccgccccatggctgactaattttttttatttatgcagaggccgaggccgcctcggcctctgagctattccagaagtagtgaggaggcttttttggaggcctaggcttttgcaaaaagctctctggctaactagagaacccactgcttactggcttatcgaaattaatacgactcactatagggagacccaagctggctagcgtttaaacttaagcttggtaccgagctcggatccactagtccagtgtggtggaattctgcagatatccagcacagtggcggccgctcgagtctagagggcccgtttaaacccgctgatcagcctcgactgtgccttctagttgccagccatctgttgtttgcccctcccccgtgccttccttgaccctggaaggtgccactcccactgtcctttcctaataaaatgaggaaattgcatcgcattgtctgagtaggtgtcattctattctggggggtggggtggggcaggacagcaagggggaggattgggaagacaatagcaggcatgctggggatgcggtgggctctatggcttctgaggcggaaagaaccagcatgtgagcaaaaggccagcaaaaggccaggaaccgtaaaaaggccgcgttgctggcgtttttccataggctccgcccccctgacgagcatcacaaaaatcgacgctcaagtcagaggtggcgaaacccgacaggactataaagataccaggcgtttccccctggaagctccctcgtgcgctctcctgttccgaccctgccgcttaccggatacctgtccgcctttctcccttcgggaagcgtggcgctttctcatagctcacgctgtaggtatctcagttcggtgtaggtcgttcgctccaagctgggctgtgtgcacgaaccccccgttcagcccgaccgctgcgccttatccggtaactatcgtcttgagtccaacccggtaagacacgacttatcgccactggcagcagccactggtaacaggattagcagagcgaggtatgtaggcggtgctacagagttcttgaagtggtggcctaactacggctacactagaagaacagtatttggtatctgcgctctgctgaagccagttaccttcggaaaaagagttggtagctcttgatccggcaaacaaaccaccgctggtagcggtggtttttttgtttgcaagcagcagattacgcgcagaaaaaaaggatctcaagaagatcctttgatcttttctacggggtctgacgctcagtggaacgaaaactcacgttaagggattttggtcatgacattaacctataaaaataggcgtatcacgaggccctttcgtctcgcgcgtttcggtgatgacggtgaaaacctctgacacatgcagctcccggagacggtcacagcttgtctgtaagcggatgccgggagcagacaagcccgtcagggcgcgtcagcgggtgttggcgggtgtcggggctggcttaactatgcggcatcagagcagattgtactgagagtgcaccatatgcggtgtgaaataccgcacagatgcgtaaggagaaaataccgcatcaggacgcgccctgtagcggcgcattaagcgcggcgggtgtggtggttacgcgcagcgtgaccgctacacttgccagcgccctagcgcccgctcctttcgctttcttcccttcctttctcgccacgttcgccggctttccccgtcaagctctaaatcgggggctccctttagggttccgatttagtgctttacggcacctcgaccccaaaaaacttgattagggtgatggttcacgtagtgggccatcgccctgatagacggtttttcgccctttgacgttggagtccacgttctttaatagtggactcttgttccaaactggaacaacactcaaccctatctcggtctattcttttgatttataagggattttgccgatttcggcctattggttaaaaaatgagctgatttaacaaaaatttaacgcgaattttaacaaaatattaacgcttacaatttccattcgccattcaggctgaactagatctagagtccgttacataacttacggtaaatggcccgcctggctgaccgcccaacgacccccgcccattgacgtcaataatgacgtatgttcccatagtaacgccaatagggactttccattgacgtcaatgggtggagtatttacggtaaactgcccacttggcagtacatcaagtgtatcatatgccaagtacgccccctattgacgtcaatgacggtaaatggcccgcctggcattatgcccagtacatgaccttatgggactttcctacttggcagtacatctacgtattagtcatcgctattaccatggtgatgcggttttggcagtacatcaatgggcgtggatagcggtttgactcacggggatttccaagtctccaccccattgacgtcaatgggagtttgttttggcaccaaaatcaacgggactttccaaaatgtcgtaacaactccgccccattgacgcaaatgggcggtaggcgtgtacggtgggaggtctatataagcagagctcgtttagtgaaccgtcagatcgcctggagacgccatccacgctgttttgacctccatagaagacaccgggaccgatccagcctccgcggccgggaacggtgcattggaacggaccgtgttgacaattaatcatcggcatagtatatcggcatagtataatacgacaaggtgaggaactaaaccatggccaagttgaccagtgccgttccggtgctcaccgcgcgcgacgtcgccggagcggtcgagttctggaccgaccggctcgggttctcccgggacttcgtggaggacgacttcgccggtgtggtccgggacgacgtgaccctgttcatcagcgcggtccaggaccaggtggtgccggacaacaccctggcctgggtgtgggtgcgcggcctggacgagctgtacgccgagtggtcggaggtcgtgtccacgaacttccgggacgcctccgggccggccatgaccgagatcggcgagcagccgtgggggcgggagttcgccctgcgcgacccggccggcaactgcgtgcacttcgtggccgaggagcaggactgacactcgacctcgaaacttgtttattgcagcttataatggttacaaataaagcaatagcatcacaaatttcacaaataaagcatttttttcactgcattctagttgtggtttgtccaaactcatcaatgtatcttatcatgtct

SEQ ID NO: 166 - DNA, 4239 bp, Artificial Sequence
  Description of Artificial Sequence: Synthetic polynucleotide
tagttattaatagtaatcaattacggggtcattagttcatagcccatatatggagttccgcgttacataacttacggtaaatggcccgcctggctgaccgcccaacgacccccgcccattgacgtcaataatgacgtatgttcccatagtaacgccaatagggactttccattgacgtcaatgggtggagtatttacggtaaactgcccacttggcagtacatcaagtgtatcatatgccaagtacgccccctattgacgtcaatgacggtaaatggcccgcctggcattatgcccagtacatgaccttatgggactttcctacttggcagtacatctacgtattagtcatcgctattaccatggtgatgcggttttggcagtacatcaatgggcgtggatagcggtttgactcacggggatttccaagtctccaccccattgacgtcaatgggagtttgttttggcaccaaaatcaacgggactttccaaaatgtcgtaacaactccgccccattgacgcaaatgggcggtaggcgtgtacggtgggaggtctatataagcagagctcgtttagtgaaccgtcagatcgcctggagacgccatccacgctgttttgacctccatagaagacaccgggaccgatccagcctccgcggccgggaacggtgcattggaacgcggattccccgtgccaagagtgacgtaagtaccgcctatagactctataggcacacccctttggctcttatgcatgaattaatacgactcactatagggagacagactgttcctttcctgggtcttttctgcaggcaccgtcgtcgacttaacagatctcgagctcaagcttcgaattctgcagtcgacggtaccgcgggcccgggatccaccgggtacaagtaaagcggccgcgactctagatcataatcagccataccacatttgtagaggttttacttgctttaaaaaacctcccacacctccccctgaacctgaaacataaaatgaatgcaattgttgttgttaacttgtttattgcagcttataatggttacaaataaagcaatagcatcacaaatttcacaaataaagcatttttttcactgcattctagttgtggtttgtccaaactcatcaatgtatcttaaggcgtaaattgtaagcgttaatattttgttaaaattcgcgttaaatttttgttaaatcagctcattttttaaccaataggccgaaatcggcaaaatcccttataaatcaaaagaatagaccgagatagggttgagtgttgttccagtttggaacaagagtccactattaaagaacgtggactccaacgtcaaagggcgaaaaaccgtctatcagggcgatggcccactacgtgaaccatcaccctaatcaagttttttggggtcgaggtgccgtaaagcactaaatcggaaccctaaagggagcccccgatttagagcttgacggggaaagccggcgaacgtggcgagaaaggaagggaagaaagcgaaaggagcgggcgctagggcgctggcaagtgtagcggtcacgctgcgcgtaaccaccacacccgccgcgcttaatgcgccgctacagggcgcgtcaggtggcacttttcggggaaatgtgcgcggaacccctatttgtttatttttctaaatacattcaaatatgtatccgctcatgagacaataaccctgataaatgcttcaataatattgaaaaaggaagagtcctgaggcggaaagaaccagctgtggaatgtgtgtcagttagggtgtggaaagtccccaggctccccagcaggcagaagtatgcaaagcatgcatctcaattagtcagcaaccaggtgtggaaagtccccaggctccccagcaggcagaagtatgcaaagcatgcatctcaattagtcagcaaccatagtcccgcccctaactccgcccatcccgcccctaactccgcccagttccgcccattctccgccccatggctgactaattttttttatttatgcagaggccgaggccgcctcggcctctgagctattccagaagtagtgaggaggcttttttggaggcctaggcttttgcaaagatcgatcaagagacaggatgaggatcgtttcgcatgattgaacaagatggattgcacgcaggttctccggccgcttgggtggagaggctattcggctatgactgggcacaacagacaatcggctgctctgatgccgccgtgttccggctgtcagcgcaggggcgcccggttctttttgtcaagaccgacctgtccggtgccctgaatgaactgcaagacgaggcagcgcggctatcgtggctggccacgacgggcgttccttgcgcagctgtgctcgacgttgtcactgaagcgggaagggactggctgctattgggcgaagtgccggggcaggatctcctgtcatctcaccttgctcctgccgagaaagtatccatcatggctgatgcaatgcggcggctgcatacgcttgatccggctacctgcccattcgaccaccaagcgaaacatcgcatcgagcgagcacgtactcggatggaagccggtcttgtcgatcaggatgatctggacgaagagcatcaggggctcgcgccagccgaactgttcgccaggctcaaggcgagcatgcccgacggcgaggatctcgtcgtgacccatggcgatgcctgcttgccgaatatcatggtggaaaatggccgcttttctggattcatcgactgtggccggctgggtgtggcggaccgctatcaggacatagcgttggctacccgtgatattgctgaagagcttggcggcgaatgggctgaccgcttcctcgtgctttacggtatcgccgctcccgattcgcagcgcatcgccttctatcgccttcttgacgagttcttctgagcgggactctggggttcgaaatgaccgaccaagcgacgcccaacctgccatcacgagatttcgattccaccgccgccttctatgaaaggttgggcttcggaatcgttttccgggacgccggctggatgatcctccagcgcggggatctcatgctggagttcttcgcccaccctagggggaggctaactgaaacacggaaggagacaataccggaaggaacccgcgctatgacggcaataaaaagacagaataaaacgcacggtgttgggtcgtttgttcataaacgcggggttcggtcccagggctggcactctgtcgataccccaccgagaccccattggggccaatacgcccgcgtttcttccttttccccaccccaccccccaagttcgggtgaaggcccagggctcgcagccaacgtcggggcggcaggccctgccatagcctcaggttactcatatatactttagattgatttaaaacttcatttttaatttaaaaggatctaggtgaagatcctttttgataatctcatgaccaaaatcccttaacgtgagttttcgttccactgagcgtcagaccccgtagaaaagatcaaaggatcttcttgagatcctttttttctgcgcgtaatctgctgcttgcaaacaaaaaaaccaccgctaccagcggtggtttgtttgccggatcaagagctaccaactctttttccgaaggtaactggcttcagcagagcgcagataccaaatactgtccttctagtgtagccgtagttaggccaccacttcaagaactctgtagcaccgcctacatacctcgctctgctaatcctgttaccagtggctgctgccagtggcgataagtcgtgtcttaccgggttggactcaagacgatagttaccggataaggcgcagcggtcgggctgaacggggggttcgtgcacacagcccagcttggagcgaacgacctacaccgaactgagatacctacagcgtgagctatgagaaagcgccacgcttcccgaagggagaaaggcggacaggtatccggtaagcggcagggtcggaacaggagagcgcacgagggagcttccagggggaaacgcctggtatctttatagtcctgtcgggtttcgccacctctgacttgagcgtcgatttttgtgatgctcgtcaggggggcggagcctatggaaaaacgccagcaacgcggcctttttacggttcctggccttttgctggccttttgctcacatgttctttcctgcgttatcccctgattctgtggataaccgtattaccgccatgcat

SEQ ID NO: 167 - DNA, 4930 bp, Artificial Sequence
  Description of Artificial Sequence: Synthetic polynucleotide
tagttattaatagtaatcaattacggggtcattagttcatagcccatatatggagttccgcgttacataacttacggtaaatggcccgcctggctgaccgcccaacgacccccgcccattgacgtcaataatgacgtatgttcccatagtaacgccaatagggactttccattgacgtcaatgggtggagtatttacggtaaactgcccacttggcagtacatcaagtgtatcatatgccaagtacgccccctattgacgtcaatgacggtaaatggcccgcctggcattatgcccagtacatgaccttatgggactttcctacttggcagtacatctacgtattagtcatcgctattaccatggtgatgcggttttggcagtacatcaatgggcgtggatagcggtttgactcacggggatttccaagtctccaccccattgacgtcaatgggagtttgttttggcaccaaaatcaacgggactttccaaaatgtcgtaacaactccgccccattgacgcaaatgggcggtaggcgtgtacggtgggaggtctatataagcagagctggtttagtgaaccgtggatcccgtcgcttaccgattcagaatggttgatatccgccattctgaatcggtaagcgacgaagcttaataaaggatcttttattttcattggatctgtgtgttggttttttgtgtgcggccgccctcgactgtgccttctagaagacaatagcaggcatgctggggatgcggtgggctctatggcttctgaggcggaaagaaccagctggggctctagggggtatccccacgcgccctgtagcggcgcattaagcgcggcgggtgtggtggttacgcgcagcgtgaccgctacacttgccagcgccctagcgcccgctcctttcgctttcttcccttcctttctcgccacgttcgccggctttccccgtcaagctctaaatcgggggctccctttagggttccgatttagtgctttacggcacctcgaccccaaaaaacttgattagggtgatggttcacgtagtgggccatcgccctgatagacggtttttcgccctttgacgttggagtccacgttctttaatagtggactcttgttccaaactggaacaacactcaaccctatctcggtctattcttttgatttataagggattttgccgatttcggcctattggttaaaaaatgagctgatttaacaaaaatttaacgcgaattaattctgtggaatgtgtgtcagttagggtgtggaaagtccccaggctccccagcaggcagaagtatgcaaagcatgcatctcaattagtcagcaaccaggtgtggaaagtccccaggctccccagcaggcagaagtatgcaaagcatgcatctcaattagtcagcaaccatagtcccgcccctaactccgcccatcccgcccctaactccgcccagttccgcccattctccgccccatggctgactaattttttttatttatgcagaggccgaggccgcctctgcctctgagctattccagaagtagtgaggaggcttttttggaggcctaggcttttgcaaaaagctcccgggatgaccgagtacaagcccacggtgcgcctcgccacccgcgacgacgtcccgcgggccgtacgcaccctcgccgccgcgttcgccgactaccccgccacgcgccacaccgtcgacccggaccgccacatcgagcgggtcaccgagctgcaagaactcttcctcacgcgcgtcgggctcgacatcggcaaggtgtgggtcgcggacgacggcgccgcggtggcggtctggaccacgccggagagcgtcgaagcgggggcggtgttcgccgagatcggcccgcgcatggccgagttgagcggttcccggctggccgcgcagcaacagatggaaggcctcctggcgccgcaccggcccaaggagcccgcgtggttcctggccaccgtcggcgtctcgcccgaccaccagggcaagggtctgggcagcgccgtcgtgctccccggagtggaggcggccgagcgcgccggggtgcccgccttcctggagacctccgcgccccgcaacctccccttctacgagcggctcggcttcaccgtcaccgccgacgtcgaggtgcccgaaggaccgcgcacctggtgcatgacccgcaagcccggtgcctgattcgaatgaccgaccaagcgacgcccaacctgccatcacgagatttcgattccaccgccgccttctatgaaaggttgggcttcggaatcgttttccgggacgccggctggatgatcctccagcgcggggatctcatgctggagttcttcgcccaccccaacttgtttattgcagcttataatggttacaaataaagcaatagcatcacaaatttcacaaataaagcatttttttcactgcattctagttgtggtttgtccaaactcatcaatgtatcttatcatgtctgtataccgtcgacctctagctagagcttggcgtaatcatggtcatagctgtttcctgtgtgaaattgttatccgctcacaattccacacaacatacgagccggaagcataaagtgtaaagcctggggtgcctaatgagtgagctaactcacattaattgcgttgcgctcactgcccgctttccagtcgggaaacctgtcgtgccagctgcattaatgaatcggccaacgcgcggggagaggcggtttgcgtattgggcgctcttccgcttcctcgctcactgactcgctgcgctcggtcgttcggctgcggcgagcggtatcagctcactcaaaggcggtaatacggttatccacagaatcaggggataacgcaggaaagaacatgtgagcaaaaggccagcaaaaggccaggaaccgtaaaaaggccgcgttgctggcgtttttccataggctccgcccccctgacgagcatcacaaaaatcgacgctcaagtcagaggtggcgaaacccgacaggactataaagataccaggcgtttccccctggaagctccctcgtgcgctctcctgttccgaccctgccgcttaccggatacctgtccgcctttctcccttcgggaagcgtggcgctttctcatagctcacgctgtaggtatctcagttcggtgtaggtcgttcgctccaagctgggctgtgtgcacgaaccccccgttcagcccgaccgctgcgccttatccggtaactatcgtcttgagtccaacccggtaagacacgacttatcgccactggcagcagccactggtaacaggattagcagagcgaggtatgtaggcggtgctacagagttcttgaagtggtggcctaactacggctacactagaagaacagtatttggtatctgcgctctgctgaagccagttaccttcggaaaaagagttggtagctcttgatccggcaaacaaaccaccgctggtagcggtttttttgtttgcaagcagcagattacgcgcagaaaaaaaggatctcaagaagatcctttgatcttttctacggggtctgacgctcagtggaacgaaaactcacgttaagggattttggtcatgagattatcaaaaaggatcttcacctagatccttttaaattaaaaatgaagttttaaatcaatctaaagtatatatgagtaaacttggtctgacagttaccaatgcttaatcagtgaggcacctatctcagcgatctgtctatttcgttcatccatagttgcctgactccccgtcgtgtagataactacgatacgggagggcttaccatctggccccagtgctgcaatgataccgcgagacccacgctcaccggctccagatttatcagcaataaaccagccagccggaagggccgagcgcagaagtggtcctgcaactttatccgcctccatccagtctattaattgttgccgggaagctagagtaagtagttcgccagttaatagtttgcgcaacgttgttgccattgctacaggcatcgtggtgtcacgctcgtcgtttggtatggcttcattcagctccggttcccaacgatcaaggcgagttacatgatcccccatgttgtgcaaaaaagcggttagctccttcggtcctccgatcgttgtcagaagtaagttggccgcagtgttatcactcatggttatggcagcactgcataattctcttactgtcatgccatccgtaagatgcttttctgtgactggtgagtactcaaccaagtcattctgagaatagtgtatgcggcgaccgagttgctcttgcccggcgtcaatacgggataataccgcgccacatagcagaactttaaaagtgctcatcattggaaaacgttcttcggggcgaaaactctcaaggatcttaccgctgttgagatccagttcgatgtaacccactcgtgcacccaactgatcttcagcatcttttactttcaccagcgtttctgggtgagcaaaaacaggaaggcaaaatgccgcaaaaaagggaataagggcgacacggaaatgttgaatactcatactcttcctttttcaatattattgaagcatttatcagggttattgtctcatgagcggatacatatttgaatgtatttagaaaaataaacaaataggggttccgcgcacatttccccgaaaagtgccacctgacgtcgacggatcgggagatctcccgatcccctatggtgcactctcagtacaatctgctctgatgccgcatagttaagccagtatctgctccctgcttgtgtgttggaggtcgctgagtagtgcgcgagcaaaatttaagctacaacaaggcaaggcttgaccgacaattgcatgaagaatctgcttagggttaggcgttttgcgctgcttcgcgatgtacgggccagatatacgcgttgacattgattattgac

SEQ ID NO: 168 - DNA, 6105 bp, Artificial Sequence
  Description of Artificial Sequence: Synthetic polynucleotide
tcaatattggccattagccatattattcattggttatatagcataaatcaatattggctattggccattgcatacgttgtatctatatcataatatgtacatttatattggctcatgtccaatatgaccgccatgttggcattgattattgactagttattaatagtaatcaattacggggtcattagttcatagcccatatatggagttccgcgttacataacttacggtaaatggcccgcctggctgaccgcccaacgacccccgcccattgacgtcaataatgacgtatgttcccatagtaacgccaatagggactttccattgacgtcaatgggtggagtatttacggtaaactgcccacttggcagtacatcaagtgtatcatatgccaagtccgccccctattgacgtcaatgacggtaaatggcccgcctggcattatgcccagtacatgaccttacgggactttcctacttggcagtacatctacgtattagtcatcgctattaccatggtgatgcggttttggcagtacaccaatgggcgtggatagcggtttgactcacggggatttccaagtctccaccccattgacgtcaatgggagtttgttttggcaccaaaatcaacgggactttccaaaatgtcgtaacaactgcgatcgcccgccccgttgacgcaaatgggcggtaggcgtgtacggtgggaggtctatataagcagagctcgtttagtgaaccgtcagatcactagaagctttattgcggtagtttatcacagttaaattgctaacgcagtcagtgcttctgacacaacagtctcgaacttaagctgcagtgactctcttaaggtagccttgcagaagttggtcgtgaggcactgggcaggtaagtatcaaggttacaagacaggtttaaggagaccaatagaaactgggcttgtcgagacagagaagactcttgcgtttctgataggcacctattggtcttactgacatccactttgcctttctctccacaggtgtccactcccagttcaattacagctcttaaggctagagtacttaatacgactcactataggctagcctcgagaattcacgcgtcgagcatgcatctagggcggccaattccgcccctctcccccccccccctctccctcccccccccctaacgttactggccgaagccgcttggaataaggccggtgtgcgtttgtctatatgttattttccaccatattgccgtcttttggcaatgtgagggcccggaaacctggccctgtcttcttgacgagcattcctaggggtctttcccctctcgccaaaggaatgcaaggtctgttgaatgtcgtgaaggaagcagttcctctggaagcttcttgaagacaaacaacgtctgtagcgaccctttgcaggcagcggaaccccccacctggcgacaggtgcctctgcggccaaaagccacgtgtataagatacacctgcaaaggcggcacaaccccagtgccacgttgtgagttggatagttgtggaaagagtcaaatggctctcctcaagcgtattcaacaaggggctgaaggatgcccagaaggtaccccattgtatgggatctgatctggggcctcggtgcacatgctttacatgtgtttagtcgaggttaaaaaaacgtctaggccccccgaaccacggggacgtggttttcctttgaaaaacacgatgataagcttgccacaacccgggatcctctagagtcgacccgggcggccgcttccctttagtgagggttaatgcttcgagcagacatgataagatacattgatgagtttggacaaaccacaactagaatgcagtgaaaaaaatgctttatttgtgaaatttgtgatgctattgctttatttgtaaccattataagctgcaataaacaagttaacaacaacaattgcattcattttatgtttcaggttcagggggagatgtgggaggttttttaaagcaagtaaaacctctacaaatgtggtaaaatccgataaggatcgatccgggctggcgtaatagcgaagaggcccgcaccgatcgcccttcccaacagttgcgcagcctgaatggcgaatggacgcgccctgtagcggcgcattaagcgcggcgggtgtggtggttacgcgcagcgtgaccgctacacttgccagcgccctagcgcccgctcctttcgctttcttcccttcctttctcgccacgttcgccggctttccccgtcaagctctaaatcgggggctccctttagggttccgatttagtgctttacggcacctcgaccccaaaaaacttgattagggtgatggttcacgtagtgggccatcgccctgatagacggtttttcgccctttgacgttggagtccacgttctttaatagtggactcttgttccaaactggaacaacactcaaccctatctcggtctattcttttgatttataagggattttgccgatttcggcctattggttaaaaaatgagctgatttaacaaaaatttaacgcgaattttaacaaaatattaacgcttacaatttcctgatgcggtattttctccttacgcatctgtgcggtatttcacaccgcatacgcggatctgcgcagcaccatggcctgaaataacctctgaaagaggaacttggttaggtaccttctgaggcggaaagaaccagctgtggaatgtgtgtcagttagggtgtggaaagtccccaggctccccagcaggcagaagtatgcaaagcatgcatctcaattagtcagcaaccaggtgtggaaagtccccaggctccccagcaggcagaagtatgcaaagcatgcatctcaattagtcagcaaccatagtcccgcccctaactccgcccatcccgcccctaactccgcccagttccgcccattctccgccccatggctgactaattttttttatttatgcagaggccgaggccgcctcggcctctgagctattccagaagtagtgaggaggcttttttggaggcctaggcttttgcaaaaagcttgattcttctgacacaacagtctcgaacttaaggctagagccaccatgattgaacaagatggattgcacgcaggttctccggccgcttgggtggagaggctattcggctatgactgggcacaacagacaatcggctgctctgatgccgccgtgttccggctgtcagcgcaggggcgcccggttctttttgtcaagaccgacctgtccggtgccctgaatgaactgcaggacgaggcagcgcggctatcgtggctggccacgacgggcgttccttgcgcagctgtgctcgacgttgtcactgaagcgggaagggactggctgctattgggcgaagtgccggggcaggatctcctgtcatctcaccttgctcctgccgagaaagtatccatcatggctgatgcaatgcggcggctgcatacgcttgatccggctacctgcccattcgaccaccaagcgaaacatcgcatcgagcgagcacgtactcggatggaagccggtcttgtcgatcaggatgatctggacgaagagcatcaggggctcgcgccagccgaactgttcgccaggctcaaggcgcgcatgcccgacggcgaggatctcgtcgtgacccatggcgatgcctgcttgccgaatatcatggtggaaaatggccgcttttctggattcatcgactgtggccggctgggtgtggcggaccgctatcaggacatagcgttggctacccgtgatattgctgaagagcttggcggcgaatgggctgaccgcttcctcgtgctttacggtatcgccgctcccgattcgcagcgcatcgccttctatcgccttcttgacgagttcttctgagcgggactctggggttcgaaatgaccgaccaagcgacgcccaacctgccatcacgatggccgcaataaaatatctttattttcattacatctgtgtgttggttttttgtgtgaatcgatagcgataaggatccgcgtatggtgcactctcagtacaatctgctctgatgccgcatagttaagccagccccgacacccgccaacacccgctgacgcgccctgacgggcttgtctgctcccggcatccgcttacagacaagctgtgaccgtctccgggagctgcatgtgtcagaggttttcaccgtcatcaccgaaacgcgcgagacgaaagggcctcgtgatacgcctatttttataggttaatgtcatgataataatggtttcttagacgtcaggtggcacttttcggggaaatgtgcgcggaacccctatttgtttatttttctaaatacattcaaatatgtatccgctcatgagacaataaccctgataaatgcttcaataatattgaaaaaggaagagtatgagtattcaacatttccgtgtcgcccttattcccttttttgcggcattttgccttcctgtttttgctcacccagaaacgctggtgaaagtaaaagatgctgaagatcagttgggtgcacgagtgggttacatcgaactggatctcaacagcggtaagatccttgagagttttcgccccgaagaacgttttccaatgatgagcacttttaaagttctgctatgtggcgcggtattatcccgtattgacgccgggcaagagcaactcggtcgccgcatacactattctcagaatgacttggttgagtactcaccagtcacagaaaagcatcttacggatggcatgacagtaagagaattatgcagtgctgccataaccatgagtgataacactgcggccaacttacttctgacaacgatcggaggaccgaaggagctaaccgcttttttgcacaacatgggggatcatgtaactcgccttgatcgttgggaaccggagctgaatgaagccataccaaacgacgagcgtgacaccacgatgcctgtagcaatggcaacaacgttgcgcaaactattaactggcgaactacttactctagcttcccggcaacaattaatagactggatggaggcggataaagttgcaggaccacttctgcgctcggcccttccggctggctggtttattgctgataaatctggagccggtgagcgtgggtctcgcggtatcattgcagcactggggccagatggtaagccctcccgtatcgtagttatctacacgacggggagtcaggcaactatggatgaacgaaatagacagatcgctgagataggtgcctcactgattaagcattggtaactgtcagaccaagtttactcatatatactttagattgatttaaaacttcatttttaatttaaaaggatctaggtgaagatcctttttgataatctcatgaccaaaatcccttaacgtgagttttcgttccactgagcgtcagaccccgtagaaaagatcaaaggatcttcttgagatcctttttttctgcgcgtaatctgctgcttgcaaacaaaaaaaccaccgctaccagcggtggtttgtttgccggatcaagagctaccaactctttttccgaaggtaactggcttcagcagagcgcagataccaaatactgttcttctagtgtagccgtagttaggccaccacttcaagaactctgtagcaccgcctacatacctcgctctgctaatcctgttaccagtggctgctgccagtggcgataagtcgtgtcttaccgggttggactcaagacgatagttaccggataaggcgcagcggtcgggctgaacggggggttcgtgcacacagcccagcttggagcgaacgacctacaccgaactgagatacctacagcgtgagctatgagaaagcgccacgcttcccgaagggagaaaggcggacaggtatccggtaagcggcagggtcggaacaggagagcgcacgagggagcttccagggggaaacgcctggtatctttatagtcctgtcgggtttcgccacctctgacttgagcgtcgatttttgtgatgctcgtcaggggggcggagcctatggaaaaacgccagcaacgcggcctttttacggttcctggccttttgctggccttttgctcacatggctcgacagatct

SEQ ID NO: 169 - protein, 49 aa, Artificial Sequence
  Description of Artificial Sequence: Synthetic polypeptide
AVGQDTQEVIVVPHSLPFKVVVISAILALVVLTIISLIILIMLWQKKPR

SEQ ID NO: 170 - protein, 26 aa, Artificial Sequence
  Description of Artificial Sequence: Synthetic peptide
YIPEAPRDGQAYVRKDGEWVLLSTFL

SEQ ID NO: 171 - protein, 1214 aa, Severe acute respiratory syndrome coronavirus 2
MFVFLVLLPLVSSQCVNLTTRTQLPPAYTNSFTRGVYYPDKVFRSSVLHSTQDLFLPFFSNVTWFHAIHVSGTNGTKRFDNPVLPFNDGVYFASTEKSNIIRGWIFGTTLDSKTQSLLIVNNATNVVIKVCEFQFCNDPFLGVYYHKNNKSWMESEFRVYSSANNCTFEYVSQPFLMDLEGKQGNFKNLREFVFKNIDGYFKIYSKHTPINLVRDLPQGFSALEPLVDLPIGINITRFQTLLALHRSYLTPGDSSSGWTAGAAAYYVGYLQPRTFLLKYNENGTITDAVDCALDPLSETKCTLKSFTVEKGIYQTSNFRVQPTESIVRFPNITNLCPFGEVFNATRFASVYAWNRKRISNCVADYSVLYNSASFSTFKCYGVSPTKLNDLCFTNVYADSFVIRGDEVRQIAPGQTGKIADYNYKLPDDFTGCVIAWNSNNLDSKVGGNYNYLYRLFRKSNLKPFERDISTEIYQAGSTPCNGVEGFNCYFPLQSYGFQPTNGVGYQPYRVVVLSFELLHAPATVCGPKKSTNLVKNKCVNFNFNGLTGTGVLTESNKKFLPFQQFGRDIADTTDAVRDPQTLEILDITPCSFGGVSVITPGTNTSNQVAVLYQDVNCTEVPVAIHADQLTPTWRVYSTGSNVFQTRAGCLIGAEHVNNSYECDIPIGAGICASYQTQTNSPRRARSVASQSIIAYTMSLGAENSVAYSNNSIAIPTNFTISVTTEILPVSMTKTSVDCTMYICGDSTECSNLLLQYGSFCTQLNRALTGIAVEQDKNTQEVFAQVKQIYKTPPIKDFGGFNFSQILPDPSKPSKRSFIEDLLFNKVTLADAGFIKQYGDCLGDIAARDLICAQKFNGLTVLPPLLTDEMIAQYTSALLAGTITSGWTFGAGAALQIPFAMQMAYRFNGIGVTQNVLYENQKLIANQFNSAIGKIQDSLSSTASALGKLQDVVNQNAQALNTLVKQLSSNFGAISSVLNDILSRLDKVEAEVQIDRLITGRLQSLQTYVTQQLIRAAEIRASANLAATKMSECVLGQSKRVDFCGKGYHLMSFPQSAPHGVVFLHVTYVPAQEKNFTTAPAICHDGKAHFPREGVFVSNGTHWFVTQRNFYEPQIITTDNTFVSGNCDVVIGIVNNTVYDPLQPELDSFKEELDKYFKNHTSPDVDLGDISGINASVVNIQKEIDRLNEVAKNLNESLIDLQELGKYEQYIKWPW

SEQ ID NO: 172 - protein, 1213 aa, Severe acute respiratory syndrome coronavirus 2
MFVFLVLLPLVSSQCVNLTTRTQLPPAYTNSFTRGVYYPDKVFRSSVLHSTQDLFLPFFSNVTWFHAIHVSGTNGTKRFDNPVLPFNDGVYFASTEKSNIIRGWIFGTTLDSKTQSLLIVNNATNVVIKVCEFQFCNDPFLGVYYHKNNKSWMESEFRVYSSANNCTFEYVSQPFLMDLEGKQGNFKNLREFVFKNIDGYFKIYSKHTPINLVRDLPQGFSALEPLVDLPIGINITRFQTLLALHRSYLTPGDSSSGWTAGAAAYYVGYLQPRTFLLKYNENGTITDAVDCALDPLSETKCTLKSFTVEKGIYQTSNFRVQPTESIVRFPNITNLCPFGEVFNATRFASVYAWNRKRISNCVADYSVLYNSASFSTFKCYGVSPTKLNDLCFTNVYADSFVIRGDEVRQIAPGQTGKIADYNYKLPDDFTGCVIAWNSNNLDSKVGGNYNYLYRLFRKSNLKPFERDISTEIYQAGSTPCNGVEGFNCYFPLQSYGFQPTNGVGYQPYRVVVLSFELLHAPATVCGPKKSTNLVKNKCVNFNFNGLTGTGVLTESNKKFLPFQQFGRDIADTTDAVRDPQTLEILDITPCSFGGVSVITPGTNTSNQVAVLYQDVNCTEVPVAIHADQLTPTWRVYSTGSNVFQTRAGCLIGAEHVNNSYECDIPIGAGICASYQTQTNSPRRARSVASQSIIAYTMSLGAENSVAYSNNSIAIPTNFTISVTTEILPVSMTKTSVDCTMYICGDSTECSNLLLQYGSFCTQLNRALTGIAVEQDKNTQEVFAQVKQIYKTPPIKDFGGFNFSQILPDPSKPSKRSFIEDLLFNKVTLADAGFIKQYGDCLGDIAARDLICAQKFNGLTVLPPLLTDEMIAQYTSALLAGTITSGWTFGAGAALQIPFAMQMAYRFNGIGVTQNVLYENQKLIANQFNSAIGKIQDSLSSTASALGKLQDVVNQNAQALNTLVKQLSSNFGAISSVLNDILSRLDKVEAEVQIDRLITGRLQSLQTYVTQQLIRAAEIRASANLAATKMSECVLGQSKRVDFCGKGYHLMSFPQSAPHGVVFLHVTYVPAQEKNFTTAPAICHDGKAHFPREGVFVSNGTHWFVTQRNFYEPQIITTDNTFVSGNCDVVIGIVNNTVYDPLQPELDSFKEELDKYFKNHTSPDVDLGDISGINASVVNIQKEIDRLNEVAKNLNESLIDLQELGKYEQYIKWP

SEQ ID NO: 173 - protein, 1208 aa, Severe acute respiratory syndrome coronavirus 2
MFVFLVLLPLVSSQCVNLTTRTQLPPAYTNSFTRGVYYPDKVFRSSVLHSTQDLFLPFFSNVTWFHAIHVSGTNGTKRFDNPVLPFNDGVYFASTEKSNIIRGWIFGTTLDSKTQSLLIVNNATNVVIKVCEFQFCNDPFLGVYYHKNNKSWMESEFRVYSSANNCTFEYVSQPFLMDLEGKQGNFKNLREFVFKNIDGYFKIYSKHTPINLVRDLPQGFSALEPLVDLPIGINITRFQTLLALHRSYLTPGDSSSGWTAGAAAYYVGYLQPRTFLLKYNENGTITDAVDCALDPLSETKCTLKSFTVEKGIYQTSNFRVQPTESIVRFPNITNLCPFGEVFNATRFASVYAWNRKRISNCVADYSVLYNSASFSTFKCYGVSPTKLNDLCFTNVYADSFVIRGDEVRQIAPGQTGKIADYNYKLPDDFTGCVIAWNSNNLDSKVGGNYNYLYRLFRKSNLKPFERDISTEIYQAGSTPCNGVEGFNCYFPLQSYGFQPTNGVGYQPYRVVVLSFELLHAPATVCGPKKSTNLVKNKCVNFNFNGLTGTGVLTESNKKFLPFQQFGRDIADTTDAVRDPQTLEILDITPCSFGGVSVITPGTNTSNQVAVLYQDVNCTEVPVAIHADQLTPTWRVYSTGSNVFQTRAGCLIGAEHVNNSYECDIPIGAGICASYQTQTNSPRRARSVASQSIIAYTMSLGAENSVAYSNNSIAIPTNFTISVTTEILPVSMTKTSVDCTMYICGDSTECSNLLLQYGSFCTQLNRALTGIAVEQDKNTQEVFAQVKQIYKTPPIKDFGGFNFSQILPDPSKPSKRSFIEDLLFNKVTLADAGFIKQYGDCLGDIAARDLICAQKFNGLTVLPPLLTDEMIAQYTSALLAGTITSGWTFGAGAALQIPFAMQMAYRFNGIGVTQNVLYENQKLIANQFNSAIGKIQDSLSSTASALGKLQDVVNQNAQALNTLVKQLSSNFGAISSVLNDILSRLDKVEAEVQIDRLITGRLQSLQTYVTQQLIRAAEIRASANLAATKMSECVLGQSKRVDFCGKGYHLMSFPQSAPHGVVFLHVTYVPAQEKNFTTAPAICHDGKAHFPREGVFVSNGTHWFVTQRNFYEPQIITTDNTFVSGNCDVVIGIVNNTVYDPLQPELDSFKEELDKYFKNHTSPDVDLGDISGINASVVNIQKEIDRLNEVAKNLNESLIDLQELGKYEQ

SEQ ID NO: 174 - protein, 1196 aa, Severe acute respiratory syndrome coronavirus 2
SQCVNLTTRTQLPPAYTNSFTRGVYYPDKVFRSSVLHSTQDLFLPFFSNVTWFHAIHVSGTNGTKRFDNPVLPFNDGVYFASTEKSNIIRGWIFGTTLDSKTQSLLIVNNATNVVIKVCEFQFCNDPFLGVYYHKNNKSWMESEFRVYSSANNCTFEYVSQPFLMDLEGKQGNFKNLREFVFKNIDGYFKIYSKHTPINLVRDLPQGFSALEPLVDLPIGINITRFQTLLALHRSYLTPGDSSSGWTAGAAAYYVGYLQPRTFLLKYNENGTITDAVDCALDPLSETKCTLKSFTVEKGIYQTSNFRVQPTESIVRFPNITNLCPFGEVFNATRFASVYAWNRKRISNCVADYSVLYNSASFSTFKCYGVSPTKLNDLCFTNVYADSFVIRGDEVRQIAPGQTGKIADYNYKLPDDFTGCVIAWNSNNLDSKVGGNYNYLYRLFRKSNLKPFERDISTEIYQAGSTPCNGVEGFNCYFPLQSYGFQPTNGVGYQPYRVVVLSFELLHAPATVCGPKKSTNLVKNKCVNFNFNGLTGTGVLTESNKKFLPFQQFGRDIADTTDAVRDPQTLEILDITPCSFGGVSVITPGTNTSNQVAVLYQDVNCTEVPVAIHADQLTPTWRVYSTGSNVFQTRAGCLIGAEHVNNSYECDIPIGAGICASYQTQTNSPRRARSVASQSIIAYTMSLGAENSVAYSNNSIAIPTNFTISVTTEILPVSMTKTSVDCTMYICGDSTECSNLLLQYGSFCTQLNRALTGIAVEQDKNTQEVFAQVKQIYKTPPIKDFGGFNFSQILPDPSKPSKRSFIEDLLFNKVTLADAGFIKQYGDCLGDIAARDLICAQKFNGLTVLPPLLTDEMIAQYTSALLAGTITSGWTFGAGAALQIPFAMQMAYRFNGIGVTQNVLYENQKLIANQFNSAIGKIQDSLSSTASALGKLQDVVNQNAQALNTLVKQLSSNFGAISSVLNDILSRLDKVEAEVQIDRLITGRLQSLQTYVTQQLIRAAEIRASANLAATKMSECVLGQSKRVDFCGKGYHLMSFPQSAPHGVVFLHVTYVPAQEKNFTTAPAICHDGKAHFPREGVFVSNGTHWFVTQRNFYEPQIITTDNTFVSGNCDVVIGIVNNTVYDPLQPELDSFKEELDKYFKNHTSPDVDLGDISGINASVVNIQKEIDRLNEVAKNLNESLIDLQELGKYEQ

SEQ ID NO: 175 - protein, 137 aa, Severe acute respiratory syndrome coronavirus 2
NLCPFGEVFNATRFASVYAWNRKRISNCVADYSVLYNSASFSTFKCYGVSPTKLNDLCFTNVYADSFVIRGDEVRQIAPGQTGKIADYNYKLPDDFTGCVIAWNSNNLDSKVGGNYNYLYRLFRKSNLKPFERDIST

SEQ ID NO: 176 - protein, 40 aa, Severe acute respiratory syndrome coronavirus 2
SFIEDLLFNKVTLADAGFIKQYGDCLGDIAARDLICAQKF

SEQ ID NO: 177 - protein, 15 aa, Severe acute respiratory syndrome coronavirus 2
PSKRSFIEDLLFNKV

SEQ ID NO: 178 - protein, 18 aa, Artificial Sequence
  Description of Artificial Sequence: Synthetic peptide
MDWTWILFLVAAATRVHS

SEQ ID NO: 179 - DNA, 54 bp, Artificial Sequence
  Description of Artificial Sequence: Synthetic oligonucleotide
atggactggacatggattctgttcctggtcgctgccgctacaagagtgcattcc

SEQ ID NO: 180 - protein, 1255 aa, Artificial Sequence
  Description of Artificial Sequence: Synthetic polypeptide
MFIFLLFLTLTSGSDLDRCTTFDDVQAPNYTQHTSSMRGVYYPDEIFRSDTLYLTQDLFLPFYSNVTGFHTINHTFGNPVIPFKDGIYFAATEKSNVVRGWVFGSTMNNKSQSVIIINNSTNVVIRACNFELCDNPFFAVSKPMGTQTHTMIFDNAFNCTFEYISDAFSLDVSEKSGNFKHLREFVFKNKDGFLYVYKGYQPIDVVRDLPSGFNTLKPIFKLPLGINITNFRAILTAFSPAQDIWGTSAAAYFVGYLKPTTFMLKYDENGTITDAVDCSQNPLAELKCSVKSFEIDKGIYQTSNFRVVPSGDVVRFPNITNLCPFGEVFNATKFPSVYAWERKKISNCVADYSVLYNSTFFSTFKCYGVSATKLNDLCFSNVYADSFVVKGDDVRQIAPGQTGVIADYNYKLPDDFMGCVLAWNTRNIDATSTGNYNYKYRYLRHGKLRPFERDISNVPFSPDGKPCTPPALNCYWPLNDYGFYTTTGIGYQPYRVVVLSFELLNAPATVCGPKLSTDLIKNQCVNFNFNGLTGTGVLTPSSKRFQPFQQFGRDVSDFTDSVRDPKTSEILDISPCSFGGVSVITPGTNASSEVAVLYQDVNCTDVSTAIHADQLTPAWRIYSTGNNVFQTQAGCLIGAEHVDTSYECDIPIGAGICASYHTVSLLRSTSQKSIVAYTMSLGADSSIAYSNNTIAIPTNFSISITTEVMPVSMAKTSVDCNMYICGDSTECANLLLQYGSFCTQLNRALSGIAAEQDRNTREVFAQVKQMYKTPTLKYFGGFNFSQILPDPLKPTKRSFIEDLLFNKVTLADAGFMKQYGECLGDINARDLICAQKFNGLTVLPPLLTDDMIAAYTAALVSGTATAGWTFGAGAALQIPFAMQMAYRFNGIGVTQNVLYENQKQIANQFNKAISQIQESLTTTSTALGKLQDVVNQNAQALNTLVKQLSSNFGAISSVLNDILSRLDKVEAEVQIDRLITGRLQSLQTYVTQQLIRAAEIRASANLAATKMSECVLGQSKRVDFCGKGYHLMSFPQAAPHGVVFLHVTYVPSQERNFTTAPAICHEGKAYFPREGVFVFNGTSWFITQRNFFSPQIITTDNTFVSGNCDVVIGIINNTVYDPLQPELDSFKEELDKYFKNHTSPDVDLGDISGINASVVNIQKEIDRLNEVAKNLNESLIDLQELGKYEQYIKWPWYVWLGFIAGLIAIVMVTILLCCMTSCCSCLKGACSCGSCCKFDEDDSEPVLKGVKLHYT

SEQ ID NO: 181 - DNA, 3909 bp, Artificial Sequence
  Description of Artificial Sequence: Synthetic polynucleotide
atggactggacctggatcctgttcctggtggccgccgccaccagggtgcacagcctgaggttcggcatcgtggccagcagggccaaccacgccctggtgggcggcagcggcggcagcggcggcagcggcggcagcggcggcggcatgttcatcttcctgctgttcctgaccctgaccagcggcagcgacctggacaggtgcaccaccttcgacgacgtgcaggcccccaactacacccagcacaccagcagcatgaggggcgtgtactaccccgacgagatcttcaggagcgacaccctgtacctgacccaggacctgttcctgcccttctacagcaacgtgaccggcttccacaccatcaaccacaccttcggcaaccccgtgatccccttcaaggacggcatctacttcgccgccaccgagaagagcaacgtggtgaggggctgggtgttcggcagcaccatgaacaacaagagccagagcgtgatcatcatcaacaacagcaccaacgtggtgatcagggcctgcaacttcgagctgtgcgacaaccccttcttcgccgtgagcaagcccatgggcacccagacccacaccatgatcttcgacaacgccttcaactgcaccttcgagtacatcagcgacgccttcagcctggacgtgagcgagaagagcggcaacttcaagcacctgagggagttcgtgttcaagaacaaggacggcttcctgtacgtgtacaagggctaccagcccatcgacgtggtgagggacctgcccagcggcttcaacaccctgaagcccatcttcaagctgcccctgggcatcaacatcaccaacttcagggccatcctgaccgccttcagccccgcccaggacatctggggcaccagcgccgccgcctacttcgtgggctacctgaagcccaccaccttcatgctgaagtacgacgagaacggcaccatcaccgacgccgtggactgcagccagaaccccctggccgagctgaagtgcagcgtgaagagcttcgagatcgacaagggcatctaccagaccagcaacttcagggtggtgcccagcggcgacgtggtgaggttccccaacatcaccaacctgtgccccttcggcgaggtgttcaacgccaccaagttccccagcgtgtacgcctgggagaggaagaagatcagcaactgcgtggccgactacagcgtgctgtacaacagcaccttcttcagcaccttcaagtgctacggcgtgagcgccaccaagctgaacgacctgtgcttcagcaacgtgtacgccgacagcttcgtggtgaagggcgacgacgtgaggcagatcgcccccggccagaccggcgtgatcgccgactacaactacaagctgcccgacgacttcatgggctgcgtgctggcctggaacaccaggaacatcgacgccaccagcaccggcaactacaactacaagtacaggtacctgaggcacggcaagctgaggcccttcgagagggacatcagcaacgtgcccttcagccccgacggcaagccctgcaccccccccgccctgaactgctactggcccctgaacgactacggcttctacaccaccaccggcatcggctaccagccctacagggtggtggtgctgagcttcgagctgctgaacgcccccgccaccgtgtgcggccccaagctgagcaccgacctgatcaagaaccagtgcgtgaacttcaacttcaacggcctgaccggcaccggcgtgctgacccccagcagcaagaggttccagcccttccagcagttcggcagggacgtgagcgacttcaccgacagcgtgagggaccccaagaccagcgagatcctggacatcagcccctgcagcttcggcggcgtgagcgtgatcacccccggcaccaacgccagcagcgaggtggccgtgctgtaccaggacgtgaactgcaccgacgtgagcaccgccatccacgccgaccagctgacccccgcctggaggatctacagcaccggcaacaacgtgttccagacccaggccggctgcctgatcggcgccgagcacgtggacaccagctacgagtgcgacatccccatcggcgccggcatctgcgccagctaccacaccgtgagcctgctgaggagcaccagccagaagagcatcgtggcctacaccatgagcctgggcgccgacagcagcatcgcctacagcaacaacaccatcgccatccccaccaacttcagcatcagcatcaccaccgaggtgatgcccgtgagcatggccaagaccagcgtggactgcaacatgtacatctgcggcgacagcaccgagtgcgccaacctgctgctgcagtacggcagcttctgcacccagctgaacagggccctgagcggcatcgccgccgagcaggacaggaacaccagggaggtgttcgcccaggtgaagcagatgtacaagacccccaccctgaagtacttcggcggcttcaacttcagccagatcctgcccgaccccctgaagcccaccaagaggagcttcatcgaggacctgctgttcaacaaggtgaccctggccgacgccggcttcatgaagcagtacggcgagtgcctgggcgacatcaacgccagggacctgatctgcgcccagaagttcaacggcctgaccgtgctgccccccctgctgaccgacgacatgatcgccgcctacaccgccgccctggtgagcggcaccgccaccgccggctggaccttcggcgccggcgccgccctgcagatccccttcgccatgcagatggcctacaggttcaacggcatcggcgtgacccagaacgtgctgtacgagaaccagaagcagatcgccaaccagttcaacaaggccatcagccagatccaggagagcctgaccaccaccagcaccgccctgggcaagctgcaggacgtggtgaaccagaacgcccaggccctgaacaccctggtgaagcagctgagcagcaacttcggcgccatcagcagcgtgctgaacgacatcctgagcaggctggacaaggtggaggccgaggtgcagatcgacaggctgatcaccggcaggctgcagagcctgcagacctacgtgacccagcagctgatcagggccgccgagatcagggccagcgccaacctggccgccaccaagatgagcgagtgcgtgctgggccagagcaagagggtggacttctgcggcaagggctaccacctgatgagcttcccccaggccgccccccacggcgtggtgttcctgcacgtgacctacgtgcccagccaggagaggaacttcaccaccgcccccgccatctgccacgagggcaaggcctacttccccagggagggcgtgttcgtgttcaacggcaccagctggttcatcacccagaggaacttcttcagcccccagatcatcaccaccgacaacaccttcgtgagcggcaactgcgacgtggtgatcggcatcatcaacaacaccgtgtacgaccccctgcagcccgagctggacagcttcaaggaggagctggacaagtacttcaagaaccacaccagccccgacgtggacctgggcgacatcagcggcatcaacgccagcgtggtgaacatccagaaggagatcgacaggctgaacgaggtggccaagaacctgaacgagagcctgatcgacctgcaggagctgggcaagtacgagcagtacatcaagtggccctggtacgtgtggctgggcttcatcgccggcctgatcgccatcgtgatggtgaccatcctgctgtgctgcatgaccagctgctgcagctgcctgaagggcgcctgcagctgcggcagctgctgcaagttcgacgaggacgacagcgagcccgtgctgaagggcgtgaagctgcactacacc

SEQ ID NO: 182 - protein, 1321 aa, Artificial Sequence
  Description of Artificial Sequence: Synthetic polypeptide
MDWTWILFLVAAATRVHSLRFGIVASRANHALVGGSGGSGGSGGSGGGMFVFLVLLPLVSSQCVNLTTRTQLPPAYTNSFTRGVYYPDKVFRSSVLHSTQDLFLPFFSNVTWFHAIHVSGTNGTKRFDNPVLPFNDGVYFASTEKSNIIRGWIFGTTLDSKTQSLLIVNNATNVVIKVCEFQFCNDPFLGVYYHKNNKSWMESEFRVYSSANNCTFEYVSQPFLMDLEGKQGNFKNLREFVFKNIDGYFKIYSKHTPINLVRDLPQGFSALEPLVDLPIGINITRFQTLLALHRSYLTPGDSSSGWTAGAAAYYVGYLQPRTFLLKYNENGTITDAVDCALDPLSETKCTLKSFTVEKGIYQTSNFRVQPTESIVRFPNITNLCPFGEVFNATRFASVYAWNRKRISNCVADYSVLYNSASFSTFKCYGVSPTKLNDLCFTNVYADSFVIRGDEVRQIAPGQTGKIADYNYKLPDDFTGCVIAWNSNNLDSKVGGNYNYLYRLFRKSNLKPFERDISTEIYQAGSTPCNGVEGFNCYFPLQSYGFQPTNGVGYQPYRVVVLSFELLHAPATVCGPKKSTNLVKNKCVNFNFNGLTGTGVLTESNKKFLPFQQFGRDIADTTDAVRDPQTLEILDITPCSFGGVSVITPGTNTSNQVAVLYQDVNCTEVPVAIHADQLTPTWRVYSTGSNVFQTRAGCLIGAEHVNNSYECDIPIGAGICASYQTQTNSPRRARSVASQSIIAYTMSLGAENSVAYSNNSIAIPTNFTISVTTEILPVSMTKTSVDCTMYICGDSTECSNLLLQYGSFCTQLNRALTGIAVEQDKNTQEVFAQVKQIYKTPPIKDFGGFNFSQILPDPSKPSKRSFIEDLLFNKVTLADAGFIKQYGDCLGDIAARDLICAQKFNGLTVLPPLLTDEMIAQYTSALLAGTITSGWTFGAGAALQIPFAMQMAYRFNGIGVTQNVLYENQKLIANQFNSAIGKIQDSLSSTASALGKLQDVVNQNAQALNTLVKQLSSNFGAISSVLNDILSRLDKVEAEVQIDRLITGRLQSLQTYVTQQLIRAAEIRASANLAATKMSECVLGQSKRVDFCGKGYHLMSFPQSAPHGVVFLHVTYVPAQEKNFTTAPAICHDGKAHFPREGVFVSNGTHWFVTQRNFYEPQIITTDNTFVSGNCDVVIGIVNNTVYDPLQPELDSFKEELDKYFKNHTSPDVDLGDISGINASVVNIQKEIDRLNEVAKNLNESLIDLQELGKYEQYIKWPWYIWLGFIAGLIAIVMVTIMLCCMTSCCSCLKGCCSCGSCCKFDEDDSEPVLKGVKLHYT

SEQ ID NO: 183 - DNA, 3963 bp, Artificial Sequence
  Description of Artificial Sequence: Synthetic polynucleotide
atggactggacctggatcctgttcctggtggccgccgccaccagggtgcacagcctgaggttcggcatcgtggccagcagggccaaccacgccctggtgggcggcagcggcggcagcggcggcagcggcggcagcggcggcggcatgttcgtgttcctggtgctgctgcccctggtgagcagccagtgcgtgaacctgaccaccaggacccagctgccccccgcctacaccaacagcttcaccaggggcgtgtactaccccgacaaggtgttcaggagcagcgtgctgcacagcacccaggacctgttcctgcccttcttcagcaacgtgacctggttccacgccatccacgtgagcggcaccaacggcaccaagaggttcgacaaccccgtgctgcccttcaacgacggcgtgtacttcgccagcaccgagaagagcaacatcatcaggggctggatcttcggcaccaccctggacagcaagacccagagcctgctgatcgtgaacaacgccaccaacgtggtgatcaaggtgtgcgagttccagttctgcaacgaccccttcctgggcgtgtactaccacaagaacaacaagagctggatggagagcgagttcagggtgtacagcagcgccaacaactgcaccttcgagtacgtgagccagcccttcctgatggacctggagggcaagcagggcaacttcaagaacctgagggagttcgtgttcaagaacatcgacggctacttcaagatctacagcaagcacacccccatcaacctggtgagggacctgccccagggcttcagcgccctggagcccctggtggacctgcccatcggcatcaacatcaccaggttccagaccctgctggccctgcacaggagctacctgacccccggcgacagcagcagcggctggaccgccggcgccgccgcctactacgtgggctacctgcagcccaggaccttcctgctgaagtacaacgagaacggcaccatcaccgacgccgtggactgcgccctggaccccctgagcgagaccaagtgcaccctgaagagcttcaccgtggagaagggcatctaccagaccagcaacttcagggtgcagcccaccgagagcatcgtgaggttccccaacatcaccaacctgtgccccttcggcgaggtgttcaacgccaccaggttcgccagcgtgtacgcctggaacaggaagaggatcagcaactgcgtggccgactacagcgtgctgtacaacagcgccagcttcagcaccttcaagtgctacggcgtgagccccaccaagctgaacgacctgtgcttcaccaacgtgtacgccgacagcttcgtgatcaggggcgacgaggtgaggcagatcgcccccggccagaccggcaagatcgccgactacaactacaagctgcccgacgacttcaccggctgcgtgatcgcctggaacagcaacaacctggacagcaaggtgggcggcaactacaactacctgtacaggctgttcaggaagagcaacctgaagcccttcgagagggacatcagcaccgagatctaccaggccggcagcaccccctgcaacggcgtggagggcttcaactgctacttccccctgcagagctacggcttccagcccaccaacggcgtgggctaccagccctacagggtggtggtgctgagcttcgagctgctgcacgcccccgccaccgtgtgcggccccaagaagagcaccaacctggtgaagaacaagtgcgtgaacttcaacttcaacggcctgaccggcaccggcgtgctgaccgagagcaacaagaagttcctgcccttccagcagttcggcagggacatcgccgacaccaccgacgccgtgagggacccccagaccctggagatcctggacatcaccccctgcagcttcggcggcgtgagcgtgatcacccccggcaccaacaccagcaaccaggtggccgtgctgtaccaggacgtgaactgcaccgaggtgcccgtggccatccacgccgaccagctgacccccacctggagggtgtacagcaccggcagcaacgtgttccagaccagggccggctgcctgatcggcgccgagcacgtgaacaacagctacgagtgcgacatccccatcggcgccggcatctgcgccagctaccagacccagaccaacagccccaggagggccaggagcgtggccagccagagcatcatcgcctacaccatgagcctgggcgccgagaacagcgtggcctacagcaacaacagcatcgccatccccaccaacttcaccatcagcgtgaccaccgagatcctgcccgtgagcatgaccaagaccagcgtggactgcaccatgtacatctgcggcgacagcaccgagtgcagcaacctgctgctgcagtacggcagcttctgcacccagctgaacagggccctgaccggcatcgccgtggagcaggacaagaacacccaggaggtgttcgcccaggtgaagcagatctacaagaccccccccatcaaggacttcggcggcttcaacttcagccagatcctgcccgaccccagcaagcccagcaagaggagcttcatcgaggacctgctgttcaacaaggtgaccctggccgacgccggcttcatcaagcagtacggcgactgcctgggcgacatcgccgccagggacctgatctgcgcccagaagttcaacggcctgaccgtgctgccccccctgctgaccgacgagatgatcgcccagtacaccagcgccctgctggccggcaccatcaccagcggctggaccttcggcgccggcgccgccctgcagatccccttcgccatgcagatggcctacaggttcaacggcatcggcgtgacccagaacgtgctgtacgagaaccagaagctgatcgccaaccagttcaacagcgccatcggcaagatccaggacagcctgagcagcaccgccagcgccctgggcaagctgcaggacgtggtgaaccagaacgcccaggccctgaacaccctggtgaagcagctgagcagcaacttcggcgccatcagcagcgtgctgaacgacatcctgagcaggctggacaaggtggaggccgaggtgcagatcgacaggctgatcaccggcaggctgcagagcctgcagacctacgtgacccagcagctgatcagggccgccgagatcagggccagcgccaacctggccgccaccaagatgagcgagtgcgtgctgggccagagcaagagggtggacttctgcggcaagggctaccacctgatgagcttcccccagagcgccccccacggcgtggtgttcctgcacgtgacctacgtgcccgcccaggagaagaacttcaccaccgcccccgccatctgccacgacggcaaggcccacttccccagggagggcgtgttcgtgagcaacggcacccactggttcgtgacccagaggaacttctacgagccccagatcatcaccaccgacaacaccttcgtgagcggcaactgcgacgtggtgatcggcatcgtgaacaacaccgtgtacgaccccctgcagcccgagctggacagcttcaaggaggagctggacaagtacttcaagaaccacaccagccccgacgtggacctgggcgacatcagcggcatcaacgccagcgtggtgaacatccagaaggagatcgacaggctgaacgaggtggccaagaacctgaacgagagcctgatcgacctgcaggagctgggcaagtacgagcagtacatcaagtggccctggtacatctggctgggcttcatcgccggcctgatcgccatcgtgatggtgaccatcatgctgtgctgcatgaccagctgctgcagctgcctgaagggctgctgcagctgcggcagctgctgcaagttcgacgaggacgacagcgagcccgtgctgaagggcgtgaagctgcactacacc

SEQ ID NO: 184 - protein, 271 aa, Artificial Sequence
  Description of Artificial Sequence: Synthetic polypeptide
MDWTWILFLVAAATRVHSLRFGIVASRANHALVGGSGGSGGSGGSGGGRVQPTESIVRFPNITNLCPFGEVFNATRFASVYAWNRKRISNCVADYSVLYNSASFSTFKCYGVSPTKLNDLCFTNVYADSFVIRGDEVRQIAPGQTGKIADYNYKLPDDFTGCVIAWNSNNLDSKVGGNYNYLYRLFRKSNLKPFERDISTEIYQAGSTPCNGVEGFNCYFPLQSYGFQPTNGVGYQPYRVVVLSFELLHAPATVCGPKKSTNLVKNKCVNF

SEQ ID NO: 185 - DNA, 813 bp, Artificial Sequence
  Description of Artificial Sequence: Synthetic polynucleotide
atggactggacctggatcctgttcctggtggccgccgccaccagggtgcacagcctgaggttcggcatcgtggccagcagggccaaccacgccctggtgggcggcagcggcggcagcggcggcagcggcggcagcggcggcggcagggtgcagcccaccgagagcatcgtgaggttccccaacatcaccaacctgtgccccttcggcgaggtgttcaacgccaccaggttcgccagcgtgtacgcctggaacaggaagaggatcagcaactgcgtggccgactacagcgtgctgtacaacagcgccagcttcagcaccttcaagtgctacggcgtgagccccaccaagctgaacgacctgtgcttcaccaacgtgtacgccgacagcttcgtgatcaggggcgacgaggtgaggcagatcgcccccggccagaccggcaagatcgccgactacaactacaagctgcccgacgacttcaccggctgcgtgatcgcctggaacagcaacaacctggacagcaaggtgggcggcaactacaactacctgtacaggctgttcaggaagagcaacctgaagcccttcgagagggacatcagcaccgagatctaccaggccggcagcaccccctgcaacggcgtggagggcttcaactgctacttccccctgcagagctacggcttccagcccaccaacggcgtgggctaccagccctacagggtggtggtgctgagcttcgagctgctgcacgcccccgccaccgtgtgcggccccaagaagagcaccaacctggtgaagaacaagtgcgtgaacttc

SEQ ID NO: 186 - protein, 1401 aa, Artificial Sequence
  Description of Artificial Sequence: Synthetic polypeptide
MDWTWILFLVAAATRVHSLRFGIVASRANHALVGGSGGSGGSGGSGGGMIHSVFLLMFLLTPTESYVDVGPDSVKSACIEVDIQQTFFDKTWPRPIDVSKADGIIYPQGRTYSNITITYQGLFPYQGDHGDMYVYSAGHATGTTPQKLFVANYSQDVKQFANGFVVRIGAAANSTGTVIISPSTSATIRKIYPAFMLGSSVGNFSDGKMGRFFNHTLVLLPDGCGTLLRAFYCILEPRSGNHCPAGNSYTSFATYHTPATDCSDGNYNRNASLNSFKEYFNLRNCTFMYTYNITEDEILEWFGITQTAQGVHLFSSRYVDLYGGNMFQFATLPVYDTIKYYSIIPHSIRSIQSDRKAWAAFYVYKLQPLTFLLDFSVDGYIRRAIDCGFNDLSQLHCSYESFDVESGVYSVSSFEAKPSGSVVEQAEGVECDFSPLLSGTPPQVYNFKRLVFTNCNYNLTKLLSLFSVNDFTCSQISPAAIASNCYSSLILDYFSYPLSMKSDLSVSSAGPISQFNYKQSFSNPTCLILATVPHNLTTITKPLKYSYINKCSRFLSDDRTEVPQLVNANQYSPCVSIVPSTVWEDGDYYRKQLSPLEGGGWLVASGSTVAMTEQLQMGFGITVQYGTDTNSVCPKLEFANDTKIASQLGNCVEYSLYGVSGRGVFQNCTAVGVRQQRFVYDAYQNLVGYYSDDGNYYCLRACVSVPVSVIYDKETKTHATLFGSVACEHISSTMSQYSRSTRSMLKRRDSTYGPLQTPVGCVLGLVNSSLFVEDCKLPLGQSLCALPDTPSTLTPRSVRSVPGEMRLASIAFNHPIQVDQLNSSYFKLSIPTNFSFGVTQEYIQTTIQKVTVDCKQYVCNGFQKCEQLLREYGQFCSKINQALHGANLRQDDSVRNLFASVKSSQSSPIIPGFGGDFNLTLLEPVSISTGSRSARSAIEDLLFDKVTIADPGYMQGYDDCMQQGPASARDLICAQYVAGYKVLPPLMDVNMEAAYTSSLLGSIAGVGWTAGLSSFAAIPFAQSIFYRLNGVGITQQVLSENQKLIANKFNQALGAMQTGFTTTNEAFHKVQDAVNNNAQALSKLASELSNTFGAISASIGDIIQRLDVLEQDAQIDRLINGRLTTLNAFVAQQLVRSESAALSAQLAKDKVNECVKAQSKRSGFCGQGTHIVSFVVNAPNGLYFMHVGYYPSNHIEVVSAYGLCDAANPTNCIAPVNGYFIKTNNTRIVDEWSYTGSSFYAPEPITSLNTKYVAPQVTYQNISTNLPPPLLGNSTGIDFQDELDEFFKNVSTSIPNFGSLTQINTTLLDLTYEMLSLQQVVKALNESYIDLKELGNYTYYNKWPWYIWLGFIAGLVALALCVFFILCCTGCGTNCMGKLKCNRCCDRYEEYDLEPHKVHVH

SEQ ID NO: 187 - DNA, 4203 bp, Artificial Sequence
  Description of Artificial Sequence: Synthetic polynucleotide
atggactggacctggatcctgttcctggtggccgccgccaccagggtgcacagcctgaggttcggcatcgtggccagcagggccaaccacgccctggtgggcggcagcggcggcagcggcggcagcggcggcagcggcggcggcatgatccacagcgtgttcctgctgatgttcctgctgacccccaccgagagctacgtggacgtgggccccgacagcgtgaagagcgcctgcatcgaggtggacatccagcagaccttcttcgacaagacctggcccaggcccatcgacgtgagcaaggccgacggcatcatctacccccagggcaggacctacagcaacatcaccatcacctaccagggcctgttcccctaccagggcgaccacggcgacatgtacgtgtacagcgccggccacgccaccggcaccaccccccagaagctgttcgtggccaactacagccaggacgtgaagcagttcgccaacggcttcgtggtgaggatcggcgccgccgccaacagcaccggcaccgtgatcatcagccccagcaccagcgccaccatcaggaagatctaccccgccttcatgctgggcagcagcgtgggcaacttcagcgacggcaagatgggcaggttcttcaaccacaccctggtgctgctgcccgacggctgcggcaccctgctgagggccttctactgcatcctggagcccaggagcggcaaccactgccccgccggcaacagctacaccagcttcgccacctaccacacccccgccaccgactgcagcgacggcaactacaacaggaacgccagcctgaacagcttcaaggagtacttcaacctgaggaactgcaccttcatgtacacctacaacatcaccgaggacgagatcctggagtggttcggcatcacccagaccgcccagggcgtgcacctgttcagcagcaggtacgtggacctgtacggcggcaacatgttccagttcgccaccctgcccgtgtacgacaccatcaagtactacagcatcatcccccacagcatcaggagcatccagagcgacaggaaggcctgggccgccttctacgtgtacaagctgcagcccctgaccttcctgctggacttcagcgtggacggctacatcaggagggccatcgactgcggcttcaacgacctgagccagctgcactgcagctacgagagcttcgacgtggagagcggcgtgtacagcgtgagcagcttcgaggccaagcccagcggcagcgtggtggagcaggccgagggcgtggagtgcgacttcagccccctgctgagcggcacccccccccaggtgtacaacttcaagaggctggtgttcaccaactgcaactacaacctgaccaagctgctgagcctgttcagcgtgaacgacttcacctgcagccagatcagccccgccgccatcgccagcaactgctacagcagcctgatcctggactacttcagctaccccctgagcatgaagagcgacctgagcgtgagcagcgccggccccatcagccagttcaactacaagcagagcttcagcaaccccacctgcctgatcctggccaccgtgccccacaacctgaccaccatcaccaagcccctgaagtacagctacatcaacaagtgcagcaggttcctgagcgacgacaggaccgaggtgccccagctggtgaacgccaaccagtacagcccctgcgtgagcatcgtgcccagcaccgtgtgggaggacggcgactactacaggaagcagctgagccccctggagggcggcggctggctggtggccagcggcagcaccgtggccatgaccgagcagctgcagatgggcttcggcatcaccgtgcagtacggcaccgacaccaacagcgtgtgccccaagctggagttcgccaacgacaccaagatcgccagccagctgggcaactgcgtggagtacagcctgtacggcgtgagcggcaggggcgtgttccagaactgcaccgccgtgggcgtgaggcagcagaggttcgtgtacgacgcctaccagaacctggtgggctactacagcgacgacggcaactactactgcctgagggcctgcgtgagcgtgcccgtgagcgtgatctacgacaaggagaccaagacccacgccaccctgttcggcagcgtggcctgcgagcacatcagcagcaccatgagccagtacagcaggagcaccaggagcatgctgaagaggagggacagcacctacggccccctgcagacccccgtgggctgcgtgctgggcctggtgaacagcagcctgttcgtggaggactgcaagctgcccctgggccagagcctgtgcgccctgcccgacacccccagcaccctgacccccaggagcgtgaggagcgtgcccggcgagatgaggctggccagcatcgccttcaaccaccccatccaggtggaccagctgaacagcagctacttcaagctgagcatccccaccaacttcagcttcggcgtgacccaggagtacatccagaccaccatccagaaggtgaccgtggactgcaagcagtacgtgtgcaacggcttccagaagtgcgagcagctgctgagggagtacggccagttctgcagcaagatcaaccaggccctgcacggcgccaacctgaggcaggacgacagcgtgaggaacctgttcgccagcgtgaagagcagccagagcagccccatcatccccggcttcggcggcgacttcaacctgaccctgctggagcccgtgagcatcagcaccggcagcaggagcgccaggagcgccatcgaggacctgctgttcgacaaggtgaccatcgccgaccccggctacatgcagggctacgacgactgcatgcagcagggccccgccagcgccagggacctgatctgcgcccagtacgtggccggctacaaggtgctgccccccctgatggacgtgaacatggaggccgcctacaccagcagcctgctgggcagcatcgccggcgtgggctggaccgccggcctgagcagcttcgccgccatccccttcgcccagagcatcttctacaggctgaacggcgtgggcatcacccagcaggtgctgagcgagaaccagaagctgatcgccaacaagttcaaccaggccctgggcgccatgcagaccggcttcaccaccaccaacgaggccttccacaaggtgcaggacgccgtgaacaacaacgcccaggccctgagcaagctggccagcgagctgagcaacaccttcggcgccatcagcgccagcatcggcgacatcatccagaggctggacgtgctggagcaggacgcccagatcgacaggctgatcaacggcaggctgaccaccctgaacgccttcgtggcccagcagctggtgaggagcgagagcgccgccctgagcgcccagctggccaaggacaaggtgaacgagtgcgtgaaggcccagagcaagaggagcggcttctgcggccagggcacccacatcgtgagcttcgtggtgaacgcccccaacggcctgtacttcatgcacgtgggctactaccccagcaaccacatcgaggtggtgagcgcctacggcctgtgcgacgccgccaaccccaccaactgcatcgcccccgtgaacggctacttcatcaagaccaacaacaccaggatcgtggacgagtggagctacaccggcagcagcttctacgcccccgagcccatcaccagcctgaacaccaagtacgtggccccccaggtgacctaccagaacatcagcaccaacctgcccccccccctgctgggcaacagcaccggcatcgacttccaggacgagctggacgagttcttcaagaacgtgagcaccagcatccccaacttcggcagcctgacccagatcaacaccaccctgctggacctgacctacgagatgctgagcctgcagcaggtggtgaaggccctgaacgagagctacatcgacctgaaggagctgggcaactacacctactacaacaagtggccctggtacatctggctgggcttcatcgccggcctggtggccctggccctgtgcgtgttcttcatcctgtgctgcaccggctgcggcaccaactgcatgggcaagctgaagtgcaacaggtgctgcgacaggtacgaggagtacgacctggagccccacaaggtgcacgtgcac

SEQ ID NO: 188 - protein, 288 aa, Artificial Sequence
  Description of Artificial Sequence: Synthetic polypeptide
MDWTWILFLVAAATRVHSLRFGIVASRANHALVGGSGGSGGSGGSGGGEAKPSGSVVEQAEGVECDFSPLLSGTPPQVYNFKRLVFTNCNYNLTKLLSLFSVNDFTCSQISPAAIASNCYSSLILDYFSYPLSMKSDLSVSSAGPISQFNYKQSFSNPTCLILATVPHNLTTITKPLKYSYINKCSRFLSDDRTEVPQLVNANQYSPCVSIVPSTVWEDGDYYRKQLSPLEGGGWLVASGSTVAMTEQLQMGFGITVQYGTDTNSVCPKLEFANDTKIASQLGNCVEY

SEQ ID NO: 189 - DNA, 864 bp, Artificial Sequence
  Description of Artificial Sequence: Synthetic polynucleotide
atggactggacctggatcctgttcctggtggccgccgccaccagggtgcacagcctgaggttcggcatcgtggccagcagggccaaccacgccctggtgggcggcagcggcggcagcggcggcagcggcggcagcggcggcggcgaggccaagcccagcggcagcgtggtggagcaggccgagggcgtggagtgcgacttcagccccctgctgagcggcacccccccccaggtgtacaacttcaagaggctggtgttcaccaactgcaactacaacctgaccaagctgctgagcctgttcagcgtgaacgacttcacctgcagccagatcagccccgccgccatcgccagcaactgctacagcagcctgatcctggactacttcagctaccccctgagcatgaagagcgacctgagcgtgagcagcgccggccccatcagccagttcaactacaagcagagcttcagcaaccccacctgcctgatcctggccaccgtgccccacaacctgaccaccatcaccaagcccctgaagtacagctacatcaacaagtgcagcaggttcctgagcgacgacaggaccgaggtgccccagctggtgaacgccaaccagtacagcccctgcgtgagcatcgtgcccagcaccgtgtgggaggacggcgactactacaggaagcagctgagccccctggagggcggcggctggctggtggccagcggcagcaccgtggccatgaccgagcagctgcagatgggcttcggcatcaccgtgcagtacggcaccgacaccaacagcgtgtgccccaagctggagttcgccaacgacaccaagatcgccagccagctgggcaactgcgtggagtac

SEQ ID NO: 190 - protein, 551 aa, Artificial Sequence
  Description of Artificial Sequence: Synthetic polypeptide
MDWTWILFLVAAATRVHSLRFGIVASRANHALVGGSGGSGGSGGSGGGNITEEFYQSTCSAVSKGYLSALRTGWYTSVITIELSNIKENKCNGTDAKVKLIKQELDKYKNAVTELQLLMQSTPPTNNRARRELPRFMNYTLNNAKKTNVTLSKKRKRRFLGFLLGVGSAIASGVAVSKVLHLEGEVNKIKSALLSTNKAVVSLSNGVSVLTSKVLDLKNYIDKQLLPIVNKQSCSISNIETVIEFQQKNNRLLEITREFSVNAGVTTPVSTYMLTNSELLSLINDMPITNDQKKLMSNNVQIVRQQSYSIMSIIKEEVLAYVVQLPLYGVIDTPCWKLHTSPLCTTNTKEGSNICLTRTDRGWYCDNAGSVSFFPQAETCKVQSNRVFCDTMNSLTLPSEINLCNVDIFNPKYDCKIMTSKTDVSSSVITSLGAIVSCYGKTKCTASNKNRGIIKTFSNGCDYVSNKGMDTVSVGNTLYYVNKQEGKSLYVKGEPIINFYDPLVFPSDEFDASISQVNEKINQSLAFIRKSDELLHNVNAGKSTTNIMITT

SEQ ID NO: 191 - DNA, 1653 bp, Artificial Sequence
  Description of Artificial Sequence: Synthetic polynucleotide
atggactggacctggatcctgttcctggtggccgccgccaccagggtgcacagcctgaggttcggcatcgtggccagcagggccaaccacgccctggtgggcggcagcggcggcagcggcggcagcggcggcagcggcggcggcaacatcaccgaggagttctaccagagcacctgcagcgccgtgagcaagggctacctgagcgccctgaggaccggctggtacaccagcgtgatcaccatcgagctgagcaacatcaaggagaacaagtgcaacggcaccgacgccaaggtgaagctgatcaagcaggagctggacaagtacaagaacgccgtgaccgagctgcagctgctgatgcagagcaccccccccaccaacaacagggccaggagggagctgcccaggttcatgaactacaccctgaacaacgccaagaagaccaacgtgaccctgagcaagaagaggaagaggaggttcctgggcttcctgctgggcgtgggcagcgccatcgccagcggcgtggccgtgagcaaggtgctgcacctggagggcgaggtgaacaagatcaagagcgccctgctgagcaccaacaaggccgtggtgagcctgagcaacggcgtgagcgtgctgaccagcaaggtgctggacctgaagaactacatcgacaagcagctgctgcccatcgtgaacaagcagagctgcagcatcagcaacatcgagaccgtgatcgagttccagcagaagaacaacaggctgctggagatcaccagggagttcagcgtgaacgccggcgtgaccacccccgtgagcacctacatgctgaccaacagcgagctgctgagcctgatcaacgacatgcccatcaccaacgaccagaagaagctgatgagcaacaacgtgcagatcgtgaggcagcagagctacagcatcatgagcatcatcaaggaggaggtgctggcctacgtggtgcagctgcccctgtacggcgtgatcgacaccccctgctggaagctgcacaccagccccctgtgcaccaccaacaccaaggagggcagcaacatctgcctgaccaggaccgacaggggctggtactgcgacaacgccggcagcgtgagcttcttcccccaggccgagacctgcaaggtgcagagcaacagggtgttctgcgacaccatgaacagcctgaccctgcccagcgagatcaacctgtgcaacgtggacatcttcaaccccaagtacgactgcaagatcatgaccagcaagaccgacgtgagcagcagcgtgatcaccagcctgggcgccatcgtgagctgctacggcaagaccaagtgcaccgccagcaacaagaacaggggcatcatcaagaccttcagcaacggctgcgactacgtgagcaacaagggcatggacaccgtgagcgtgggcaacaccctgtactacgtgaacaagcaggagggcaagagcctgtacgtgaagggcgagcccatcatcaacttctacgaccccctggtgttccccagcgacgagttcgacgccagcatcagccaggtgaacgagaagatcaaccagagcctggccttcatcaggaagagcgacgagctgctgcacaacgtgaacgccggcaagagcaccaccaacatcatgatcaccacc

SEQ ID NO: 192 - protein, 567 aa, Artificial Sequence
  Description of Artificial Sequence: Synthetic polypeptide
MDWTWILFLVAAATRVHSLRFGIVASRANHALVGGSGGSGGSGGSGGGMKTIIALSCILCLVFAQKIPGNDNSTATLCLGHHAVPNGTIVKTITNDRIEVTNATELVQNSSIGEICDSPHQILDGENCTLIDALLGDPQCDGFQNKKWDLFVERNKAYSNCYPYDVPDYASLRSLVASSGTLEFNNESFNWAGVTQNGTSSSCIRGSKSSFFSRLNWLTHLNSKYPALNVTMPNNEQFDKLYIWGVHHPGTDKNQISLYAQSSGRITVSTKRSQQAVIPNIGSRPRIRDIPSRISIYWTIVKPGDILLINSTGNLIAPRGYFKIRSGKSSIMRSDAPIGKCKSECITPNGSIPNDKPFQNVNRITYGACPRYVKQSTLKLATGMRNVPERQTRGIFGAIAGFIENGWEGMVDGWYGFRHQNSEGRGQAADLKSTQAAIDQINGKLNRLIGKTNEKFHQIEKEFSEVEGRIQDLEKYVEDTKIDLWSYNAELLVALENQHTIDLTDSEMNKLFEKTKKQLRENAEDMGNGCFKIYHKCDNACMGSIRNGTYDHNVYRDEALNNRFQIK

SEQ ID NO: 193 - DNA, 1701 bp, Artificial Sequence
  Description of Artificial Sequence: Synthetic polynucleotide
atggactggacctggatcctgttcctggtggccgccgccaccagggtgcacagcctgaggttcggcatcgtggccagcagggccaaccacgccctggtgggcggcagcggcggcagcggcggcagcggcggcagcggcggcggcatgaagaccatcatcgccctgagctgcatcctgtgcctggtgttcgcccagaagatccccggcaacgacaacagcaccgccaccctgtgcctgggccaccacgccgtgcccaacggcaccatcgtgaagaccatcaccaacgacaggatcgaggtgaccaacgccaccgagctggtgcagaacagcagcatcggcgagatctgcgacagcccccaccagatcctggacggcgagaactgcaccctgatcgacgccctgctgggcgacccccagtgcgacggcttccagaacaagaagtgggacctgttcgtggagaggaacaaggcctacagcaactgctacccctacgacgtgcccgactacgccagcctgaggagcctggtggccagcagcggcaccctggagttcaacaacgagagcttcaactgggccggcgtgacccagaacggcaccagcagcagctgcatcaggggcagcaagagcagcttcttcagcaggctgaactggctgacccacctgaacagcaagtaccccgccctgaacgtgaccatgcccaacaacgagcagttcgacaagctgtacatctggggcgtgcaccaccccggcaccgacaagaaccagatcagcctgtacgcccagagcagcggcaggatcaccgtgagcaccaagaggagccagcaggccgtgatccccaacatcggcagcaggcccaggatcagggacatccccagcaggatcagcatctactggaccatcgtgaagcccggcgacatcctgctgatcaacagcaccggcaacctgatcgcccccaggggctacttcaagatcaggagcggcaagagcagcatcatgaggagcgacgcccccatcggcaagtgcaagagcgagtgcatcacccccaacggcagcatccccaacgacaagcccttccagaacgtgaacaggatcacctacggcgcctgccccaggtacgtgaagcagagcaccctgaagctggccaccggcatgaggaacgtgcccgagaggcagaccaggggcatcttcggcgccatcgccggcttcatcgagaacggctgggagggcatggtggacggctggtacggcttcaggcaccagaacagcgagggcaggggccaggccgccgacctgaagagcacccaggccgccatcgaccagatcaacggcaagctgaacaggctgatcggcaagaccaacgagaagttccaccagatcgagaaggagttcagcgaggtggagggcaggatccaggacctggagaagtacgtggaggacaccaagatcgacctgtggagctacaacgccgagctgctggtggccctggagaaccagcacaccatcgacctgaccgacagcgagatgaacaagctgttcgagaagaccaagaagcagctgagggagaacgccgaggacatgggcaacggctgcttcaagatctaccacaagtgcgacaacgcctgcatgggcagcatcaggaacggcacctacgaccacaacgtgtacagggacgaggccctgaacaacaggttccagatcaag

SEQ ID NO: 194 - protein, 566 aa, Artificial Sequence
  Description of Artificial Sequence: Synthetic polypeptide
MDWTWILFLVAAATRVHSLRFGIVASRANHALVGGSGGSGGSGGSGGGMKAILVVLLYTFTTANADTLCIGYHANNSTDTVDTVLEKNVTVTHSVNLLEDKHNGKLCKLGGVAPLHLGKCNIAGWILGNPECESLSTARSWSYIVETSNSDNGTCYPGDFINYEELREQLSSVSSFERFEIFPKTSSWPNHDSNKGVTAACPHAGAKSFYKNLIWLVKKGNSYPKLNQTYINDKGKEVLVLWGIHHPPTTADQQSLYQNADAYVFVGTSRYSKKFKPEIATRPKVRDREGRMNYYWTLVEPGDKITFEATGNLVVPRYAFTMERNAGSGIIISDTPVHDCNTTCQTAEGAINTSLPFQNVHPVTIGKCPKYVKSTKLRLATGLRNVPSIQSRGLFGAIAGFIEGGWTGMVDGWYGYHHQNEQGSGYAADLKSTQNAIDKITNKVNSVIEKMNTQFTAVGKEFNHLEKRIENLNKKVDDGFLDIWTYNAELLVLLENERTLDYHDSNVKNLYEKVRNQLKNNAKEIGNGCFEFYHKCDNTCMESVKNGTYDYPKYSEEAKLNREKID

SEQ ID NO: 195 - DNA, 1698 bp, Artificial Sequence
  Description of Artificial Sequence: Synthetic polynucleotide
atggactggacctggatcctgttcctggtggccgccgccaccagggtgcacagcctgaggttcggcatcgtggccagcagggccaaccacgccctggtgggcggcagcggcggcagcggcggcagcggcggcagcggcggcggcatgaaggccatcctggtggtgctgctgtacaccttcaccaccgccaacgccgacaccctgtgcatcggctaccacgccaacaacagcaccgacaccgtggacaccgtgctggagaagaacgtgaccgtgacccacagcgtgaacctgctggaggacaagcacaacggcaagctgtgcaagctgggcggcgtggcccccctgcacctgggcaagtgcaacatcgccggctggatcctgggcaaccccgagtgcgagagcctgagcaccgccaggagctggagctacatcgtggagaccagcaacagcgacaacggcacctgctaccccggcgacttcatcaactacgaggagctgagggagcagctgagcagcgtgagcagcttcgagaggttcgagatcttccccaagaccagcagctggcccaaccacgacagcaacaagggcgtgaccgccgcctgcccccacgccggcgccaagagcttctacaagaacctgatctggctggtgaagaagggcaacagctaccccaagctgaaccagacctacatcaacgacaagggcaaggaggtgctggtgctgtggggcatccaccacccccccaccaccgccgaccagcagagcctgtaccagaacgccgacgcctacgtgttcgtgggcaccagcaggtacagcaagaagttcaagcccgagatcgccaccaggcccaaggtgagggacagggagggcaggatgaactactactggaccctggtggagcccggcgacaagatcaccttcgaggccaccggcaacctggtggtgcccaggtacgccttcaccatggagaggaacgccggcagcggcatcatcatcagcgacacccccgtgcacgactgcaacaccacctgccagaccgccgagggcgccatcaacaccagcctgcccttccagaacgtgcaccccgtgaccatcggcaagtgccccaagtacgtgaagagcaccaagctgaggctggccaccggcctgaggaacgtgcccagcatccagagcaggggcctgttcggcgccatcgccggcttcatcgagggcggctggaccggcatggtggacggctggtacggctaccaccaccagaacgagcagggcagcggctacgccgccgacctgaagagcacccagaacgccatcgacaagatcaccaacaaggtgaacagcgtgatcgagaagatgaacacccagttcaccgccgtgggcaaggagttcaaccacctggagaagaggatcgagaacctgaacaagaaggtggacgacggcttcctggacatctggacctacaacgccgagctgctggtgctgctggagaacgagaggaccctggactaccacgacagcaacgtgaagaacctgtacgagaaggtgaggaaccagctgaagaacaacgccaaggagatcggcaacggctgcttcgagttctaccacaagtgcgacaacacctgcatggagagcgtgaagaacggcacctacgactaccccaagtacagcgaggaggccaagctgaacagggagaagatcgac

SEQ ID NO: 196 - protein, 581 aa, Artificial Sequence
  Description of Artificial Sequence: Synthetic polypeptide
MDWTWILFLVAAATRVHSLRFGIVASRANHALVGGSGGSGGSGGSGGGMKAIIVLLMVVTSSADRICTGITSSNSPHVVKTATQGEVNVTGVIPLTTTPTKSHFANLKGTETRGKLCPKCLNCTDLDVALGRPKCTGKIPSARVSILHEVRPVTSGCFPIMHDRTKIRQLPNLLRGYEHVRLSTHNVINAEGAPGGPYKIGTSGSCPNITNGNGFFATMAWAVPDKNKTATNPLTIEVPYVCTEGEDQITVWGFHSDTETQMAKLYGDSKPQKFTSSANGVTTHYVSQIGGFPNQTEDGGLPQSGRIVVDYMVQKSGKTGTITYQRGILLPQKVWCASGRSKVIKGSLPLIGEADCLHEKYGGLNKSKPYYTGEHAKAIGNCPIWVKTPLKLANGTKYRPPAKLLKERGFFGAIAGFLEGGWEGMIAGWHGYTSHGAHGVAVAADLKSTQEAINKITKNLNSLSELEVKNLQRLSGAMDELHNEILELDEKVDDLRADTISSQIELAVLLSNEGIINSEDEHLLALERKLKKMLGPSAVEIGNGCFETKHKCNQTCLDKIAAGTFDAGEFSLPTFDSLNIT

SEQ ID NO: 197 - DNA, 1743 bp, Artificial Sequence
  Description of Artificial Sequence: Synthetic polynucleotide
atggactggacctggatcctgttcctggtggccgccgccaccagggtgcacagcctgaggttcggcatcgtggccagcagggccaaccacgccctggtgggcggcagcggcggcagcggcggcagcggcggcagcggcggcggcatgaaggccatcatcgtgctgctgatggtggtgaccagcagcgccgacaggatctgcaccggcatcaccagcagcaacagcccccacgtggtgaagaccgccacccagggcgaggtgaacgtgaccggcgtgatccccctgaccaccacccccaccaagagccacttcgccaacctgaagggcaccgagaccaggggcaagctgtgccccaagtgcctgaactgcaccgacctggacgtggccctgggcaggcccaagtgcaccggcaagatccccagcgccagggtgagcatcctgcacgaggtgaggcccgtgaccagcggctgcttccccatcatgcacgacaggaccaagatcaggcagctgcccaacctgctgaggggctacgagcacgtgaggctgagcacccacaacgtgatcaacgccgagggcgcccccggcggcccctacaagatcggcaccagcggcagctgccccaacatcaccaacggcaacggcttcttcgccaccatggcctgggccgtgcccgacaagaacaagaccgccaccaaccccctgaccatcgaggtgccctacgtgtgcaccgagggcgaggaccagatcaccgtgtggggcttccacagcgacaccgagacccagatggccaagctgtacggcgacagcaagccccagaagttcaccagcagcgccaacggcgtgaccacccactacgtgagccagatcggcggcttccccaaccagaccgaggacggcggcctgccccagagcggcaggatcgtggtggactacatggtgcagaagagcggcaagaccggcaccatcacctaccagaggggcatcctgctgccccagaaggtgtggtgcgccagcggcaggagcaaggtgatcaagggcagcctgcccctgatcggcgaggccgactgcctgcacgagaagtacggcggcctgaacaagagcaagccctactacaccggcgagcacgccaaggccatcggcaactgccccatctgggtgaagacccccctgaagctggccaacggcaccaagtacaggccccccgccaagctgctgaaggagaggggcttcttcggcgccatcgccggcttcctggagggcggctgggagggcatgatcgccggctggcacggctacaccagccacggcgcccacggcgtggccgtggccgccgacctgaagagcacccaggaggccatcaacaagatcaccaagaacctgaacagcctgagcgagctggaggtgaagaacctgcagaggctgagcggcgccatggacgagctgcacaacgagatcctggagctggacgagaaggtggacgacctgagggccgacaccatcagcagccagatcgagctggccgtgctgctgagcaacgagggcatcatcaacagcgaggacgagcacctgctggccctggagaggaagctgaagaagatgctgggccccagcgccgtggagatcggcaacggctgcttcgagaccaagcacaagtgcaaccagacctgcctggacaagatcgccgccggcaccttcgacgccggcgagttcagcctgcccaccttcgacagcctgaacatcacc

SEQ ID NO: 198 - protein, 582 aa, Artificial Sequence
  Description of Artificial Sequence: Synthetic polypeptide
MDWTWILFLVAAATRVHSLRFGIVASRANHALVGGSGGSGGSGGSGGGMKAIIVLLMVVTSNADRICTGITSSNSPHVVKTATQGEVNVTGVIPLTTTPTKSYFANLKGTRTRGKLCPDCLNCTDLDVALGRPMCVGTTPSAKASILHEVRPVTSGCFPIMHDRTKIRQLPNLLRGYEKIRLSTQNVIDAEKAPGGPYRLGTSGSCPNATSKIGFFATMAWAVPKDNYKNATNPLTVEVPYICTEGEDQITVWGFHSDDKTQMKSLYGDSNPQKFTSSANGVTTHYVSQIGDFPDQTEDGGLPQSGRIVVDYMMQKPGKTGTIVYQRGVLLPQKVWCASGRSKVIKGSLPLIGEADCLHEEYGGLNKSKPYYTGKHAKAIGNCPIWVKTPLKLANGTKYRPPAKLLKERGFFGAIAGFLEGGWEGMIAGWHGYTSHGAHGVAVAADLKSTQEAINKITKNLNSLSELEVKNLQRLSGAMDELHNEILELDEKVDDLRADTISSQIELAVLLSNEGIINSEDEHLLALERKLKKMLGPSAVDIGNGCFETKHKCNQTCLDRIAAGTFNAGEFSLPTFDSLNIT

SEQ ID NO: 199 - DNA, 1746 bp, Artificial Sequence
  Description of Artificial Sequence: Synthetic polynucleotide
atggactggacctggatcctgttcctggtggccgccgccaccagggtgcacagcctgaggttcggcatcgtggccagcagggccaaccacgccctggtgggcggcagcggcggcagcggcggcagcggcggcagcggcggcggcatgaaggccatcatcgtgctgctgatggtggtgaccagcaacgccgacaggatctgcaccggcatcaccagcagcaacagcccccacgtggtgaagaccgccacccagggcgaggtgaacgtgaccggcgtgatccccctgaccaccacccccaccaagagctacttcgccaacctgaagggcaccaggaccaggggcaagctgtgccccgactgcctgaactgcaccgacctggacgtggccctgggcaggcccatgtgcgtgggcaccacccccagcgccaaggccagcatcctgcacgaggtgaggcccgtgaccagcggctgcttccccatcatgcacgacaggaccaagatcaggcagctgcccaacctgctgaggggctacgagaagatcaggctgagcacccagaacgtgatcgacgccgagaaggcccccggcggcccctacaggctgggcaccagcggcagctgccccaacgccaccagcaagatcggcttcttcgccaccatggcctgggccgtgcccaaggacaactacaagaacgccaccaaccccctgaccgtggaggtgccctacatctgcaccgagggcgaggaccagatcaccgtgtggggcttccacagcgacgacaagacccagatgaagagcctgtacggcgacagcaacccccagaagttcaccagcagcgccaacggcgtgaccacccactacgtgagccagatcggcgacttccccgaccagaccgaggacggcggcctgccccagagcggcaggatcgtggtggactacatgatgcagaagcccggcaagaccggcaccatcgtgtaccagaggggcgtgctgctgccccagaaggtgtggtgcgccagcggcaggagcaaggtgatcaagggcagcctgcccctgatcggcgaggccgactgcctgcacgaggagtacggcggcctgaacaagagcaagccctactacaccggcaagcacgccaaggccatcggcaactgccccatctgggtgaagacccccctgaagctggccaacggcaccaagtacaggccccccgccaagctgctgaaggagaggggcttcttcggcgccatcgccggcttcctggagggcggctgggagggcatgatcgccggctggcacggctacaccagccacggcgcccacggcgtggccgtggccgccgacctgaagagcacccaggaggccatcaacaagatcaccaagaacctgaacagcctgagcgagctggaggtgaagaacctgcagaggctgagcggcgccatggacgagctgcacaacgagatcctggagctggacgagaaggtggacgacctgagggccgacaccatcagcagccagatcgagctggccgtgctgctgagcaacgagggcatcatcaacagcgaggacgagcacctgctggccctggagaggaagctgaagaagatgctgggccccagcgccgtggacatcggcaacggctgcttcgagaccaagcacaagtgcaaccagacctgcctggacaggatcgccgccggcaccttcaacgccggcgagttcagcctgcccaccttcgacagcctgaacatcacc

SEQ ID NO: 200 - protein, 261 aa, Artificial Sequence
  Description of Artificial Sequence: Synthetic polypeptide
MDWTWILFLVAAATRVHSLRFGIVASRANHALVGGSGGSGGSGGSGGGAPLHLGKCNIAGWILGNPECESLSTASSWSYIVETPSSDNGTCFPGDFIDYEELREQLSSVSSFERFEIFPKTSSWPNHDSNKGVTAACPHAGAKSFYKNLIWLVKKGNSYPKLSKSYINDKGKEVLVLWGIHHPSTSADQQSLYQNADTYVFVGSSRYSKKFKPEIAIRPKVRDQEGRMNYYWTLVEPGDKITFEATGNLVVPRYAFAMERN

SEQ ID NO: 201 - DNA, 783 bp, Artificial Sequence
  Description of Artificial Sequence: Synthetic polynucleotide
atggactggacctggatcctgttcctggtggccgccgccaccagggtgcacagcctgaggttcggcatcgtggccagcagggccaaccacgccctggtgggcggcagcggcggcagcggcggcagcggcggcagcggcggcggcgcccccctgcacctgggcaagtgcaacatcgccggctggatcctgggcaaccccgagtgcgagagcctgagcaccgccagcagctggagctacatcgtggagacccccagcagcgacaacggcacctgcttccccggcgacttcatcgactacgaggagctgagggagcagctgagcagcgtgagcagcttcgagaggttcgagatcttccccaagaccagcagctggcccaaccacgacagcaacaagggcgtgaccgccgcctgcccccacgccggcgccaagagcttctacaagaacctgatctggctggtgaagaagggcaacagctaccccaagctgagcaagagctacatcaacgacaagggcaaggaggtgctggtgctgtggggcatccaccaccccagcaccagcgccgaccagcagagcctgtaccagaacgccgacacctacgtgttcgtgggcagcagcaggtacagcaagaagttcaagcccgagatcgccatcaggcccaaggtgagggaccaggagggcaggatgaactactactggaccctggtggagcccggcgacaagatcaccttcgaggccaccggcaacctggtggtgcccaggtacgccttcgccatggagaggaac

SEQ ID NO: 202 - protein, 682 aa, Artificial Sequence
  Description of Artificial Sequence: Synthetic polypeptide
MDWTWILFLVAAATRVHSLRFGIVASRANHALVGGSGGSGGSGGSGGGAENLWVTVYYGVPVWKDAETTLFCASDAKAYETEKHNVWATHACVPTDPNPQEIHLENVTEEFNMWKNNMVEQMHEDIISLWDQSLKPCVKLTPLCVTLQCTNVTNNITDDMRGELKNCSFNMTTELRDKKQKVYSLFYRLDVVQINENQGNRSNNSNKEYRLINCNTSAITQACPKVSFEPIPIHYCAPAGFAILKCKDKKFNGTGPCPSVSTVQCTHGIKPVVSTQLLLNGSLAEEEVIIRSENITNNAKNILVQLNTPVQINCTRPNNNTVKSIRIGPGQAFYYTGDIIGDIRQAHCNVSKATWNETLGKVVKQLRKHFGNNTIIRFAQSSGGDLEVTTHSFNCGGEFFYCNTSGLFNSTWISNTSVQGSNSTGSNDSITLPCRIKQIINMWQRIGQAMYAPPIQGVIRCVSNITGLILTRDGGSTNSTTETFRPGGGDMRDNWRSELYKYKVVKIEPLGVAPTRCKRRVVGRRRRRRAVGIGAVSLGFLGAAGSTMGAASMTLTVQARNLLSGIVQQQSNLLRAPEPQQHLLKDTHWGIKQLQARVLAVEHYLRDQQLLGIWGCSGKLICCTNVPWNSSWSNRNLSEIWDNMTWLQWDKEISNYTQIIYGLLEESQNQQEKNEQDLLALD

SEQ ID NO: 203 - DNA, 2046 bp, Artificial Sequence
  Description of Artificial Sequence: Synthetic polynucleotide
atggactggacctggatcctgttcctggtggccgccgccaccagggtgcacagcctgaggttcggcatcgtggccagcagggccaaccacgccctggtgggcggcagcggcggcagcggcggcagcggcggcagcggcggcggcgccgagaacctgtgggtgaccgtgtactacggcgtgcccgtgtggaaggacgccgagaccaccctgttctgcgccagcgacgccaaggcctacgagaccgagaagcacaacgtgtgggccacccacgcctgcgtgcccaccgaccccaacccccaggagatccacctggagaacgtgaccgaggagttcaacatgtggaagaacaacatggtggagcagatgcacgaggacatcatcagcctgtgggaccagagcctgaagccctgcgtgaagctgacccccctgtgcgtgaccctgcagtgcaccaacgtgaccaacaacatcaccgacgacatgaggggcgagctgaagaactgcagcttcaacatgaccaccgagctgagggacaagaagcagaaggtgtacagcctgttctacaggctggacgtggtgcagatcaacgagaaccagggcaacaggagcaacaacagcaacaaggagtacaggctgatcaactgcaacaccagcgccatcacccaggcctgccccaaggtgagcttcgagcccatccccatccactactgcgcccccgccggcttcgccatcctgaagtgcaaggacaagaagttcaacggcaccggcccctgccccagcgtgagcaccgtgcagtgcacccacggcatcaagcccgtggtgagcacccagctgctgctgaacggcagcctggccgaggaggaggtgatcatcaggagcgagaacatcaccaacaacgccaagaacatcctggtgcagctgaacacccccgtgcagatcaactgcaccaggcccaacaacaacaccgtgaagagcatcaggatcggccccggccaggccttctactacaccggcgacatcatcggcgacatcaggcaggcccactgcaacgtgagcaaggccacctggaacgagaccctgggcaaggtggtgaagcagctgaggaagcacttcggcaacaacaccatcatcaggttcgcccagagcagcggcggcgacctggaggtgaccacccacagcttcaactgcggcggcgagttcttctactgcaacaccagcggcctgttcaacagcacctggatcagcaacaccagcgtgcagggcagcaacagcaccggcagcaacgacagcatcaccctgccctgcaggatcaagcagatcatcaacatgtggcagaggatcggccaggccatgtacgccccccccatccagggcgtgatcaggtgcgtgagcaacatcaccggcctgatcctgaccagggacggcggcagcaccaacagcaccaccgagaccttcaggcccggcggcggcgacatgagggacaactggaggagcgagctgtacaagtacaaggtggtgaagatcgagcccctgggcgtggcccccaccaggtgcaagaggagggtggtgggcaggaggaggaggaggagggccgtgggcatcggcgccgtgagcctgggcttcctgggcgccgccggcagcaccatgggcgccgccagcatgaccctgaccgtgcaggccaggaacctgctgagcggcatcgtgcagcagcagagcaacctgctgagggcccccgagccccagcagcacctgctgaaggacacccactggggcatcaagcagctgcaggccagggtgctggccgtggagcactacctgagggaccagcagctgctgggcatctggggctgcagcggcaagctgatctgctgcaccaacgtgccctggaacagcagctggagcaacaggaacctgagcgagatctgggacaacatgacctggctgcagtgggacaaggagatcagcaactacacccagatcatctacggcctgctggaggagagccagaaccagcaggagaagaacgagcaggacctgctggccctggac

SEQ ID NO: 204 - protein, 709 aa, Artificial Sequence
  Description of Artificial Sequence: Synthetic polypeptide
MDWTWILFLVAAATRVHSMGQIVTFFQEVPHVIEEVMNIVLIALSVLAVLKGLYNFATCGLVGLVTFLLLCGRSCTTSLYKGVYELQTLELNMETLNMTMPLSCTKNNSHHYIMVGNETGLELTLTNTSIINHKFCNLSDAHKKNLYDHALMSIISTFHLSIPNFNQYEAMSCDFNGGKISVQYNLSHSYAGDAANHCGTVANGVLQTFMRMAWGGSYIALDSGRGNWDCIMTSYQYLIIQNTTWEDHCQFSRPSPIGYLGLLSQRTRDIYISRRLLGTFTWTLSDSEGKDTPGGYCLTRWMLIEAELKCFGNTAVAKCNEKHDEEFCDMLRLFDFNKQAIQRLKAEAQMSIQLINKAVNALINDQLIMKNHLRDIMGIPYCNYSKYWYLNHTTTGRTSLPKCWLVSNGSYLNETHFSDDIEQQADNMITEMLQKEYMENQSGGSGGLRFGIVASRANHALVGGSGGAAAKPATTEGEFPETREKMSGIRRAIAKAMVHSKHTAPHVTLMDEADVTKLVAHRKKFKAIAAEKGIKLTFLPYVVKALVSALREYPVLNTSIDDETEEIIQKHYYNIGIAADTDRGLLVPVIKHADRKPIFALAQEINELAEKARDGKLTPGEMKGASCTITNIGSAGGQWFTPVINHPEVAILGIGRIAEKPIVRDGEIVAAPMLALSLSFDHRMIDGATAQKALNHIKRLLSDPELLLM

SEQ ID NO: 205 - DNA, 2127 bp, Artificial Sequence
  Description of Artificial Sequence: Synthetic polynucleotide
atggactggacctggatcctgttcctggtggccgccgccaccagggtgcacagcatgggccagatcgtgaccttcttccaggaggtgccccacgtgatcgaggaggtgatgaacatcgtgctgatcgccctgagcgtgctggccgtgctgaagggcctgtacaacttcgccacctgcggcctggtgggcctggtgaccttcctgctgctgtgcggcaggagctgcaccaccagcctgtacaagggcgtgtacgagctgcagaccctggagctgaacatggagaccctgaacatgaccatgcccctgagctgcaccaagaacaacagccaccactacatcatggtgggcaacgagaccggcctggagctgaccctgaccaacaccagcatcatcaaccacaagttctgcaacctgagcgacgcccacaagaagaacctgtacgaccacgccctgatgagcatcatcagcaccttccacctgagcatccccaacttcaaccagtacgaggccatgagctgcgacttcaacggcggcaagatcagcgtgcagtacaacctgagccacagctacgccggcgacgccgccaaccactgcggcaccgtggccaacggcgtgctgcagaccttcatgaggatggcctggggcggcagctacatcgccctggacagcggcaggggcaactgggactgcatcatgaccagctaccagtacctgatcatccagaacaccacctgggaggaccactgccagttcagcaggcccagccccatcggctacctgggcctgctgagccagaggaccagggacatctacatcagcaggaggctgctgggcaccttcacctggaccctgagcgacagcgagggcaaggacacccccggcggctactgcctgaccaggtggatgctgatcgaggccgagctgaagtgcttcggcaacaccgccgtggccaagtgcaacgagaagcacgacgaggagttctgcgacatgctgaggctgttcgacttcaacaagcaggccatccagaggctgaaggccgaggcccagatgagcatccagctgatcaacaaggccgtgaacgccctgatcaacgaccagctgatcatgaagaaccacctgagggacatcatgggcatcccctactgcaactacagcaagtactggtacctgaaccacaccaccaccggcaggaccagcctgcccaagtgctggctggtgagcaacggcagctacctgaacgagacccacttcagcgacgacatcgagcagcaggccgacaacatgatcaccgagatgctgcagaaggagtacatggagaaccagagcggcggcagcggcggcctgaggttcggcatcgtggccagcagggccaaccacgccctggtgggcggcagcggcggcgccgccgccaagcccgccaccaccgagggcgagttccccgagaccagggagaagatgagcggcatcaggagggccatcgccaaggccatggtgcacagcaagcacaccgccccccacgtgaccctgatggacgaggccgacgtgaccaagctggtggcccacaggaagaagttcaaggccatcgccgccgagaagggcatcaagctgaccttcctgccctacgtggtgaaggccctggtgagcgccctgagggagtaccccgtgctgaacaccagcatcgacgacgagaccgaggagatcatccagaagcactactacaacatcggcatcgccgccgacaccgacaggggcctgctggtgcccgtgatcaagcacgccgacaggaagcccatcttcgccctggcccaggagatcaacgagctggccgagaaggccagggacggcaagctgacccccggcgagatgaagggcgccagctgcaccatcaccaacatcggcagcgccggcggccagtggttcacccccgtgatcaaccaccccgaggtggccatcctgggcatcggcaggatcgccgagaagcccatcgtgagggacggcgagatcgtggccgcccccatgctggccctgagcctgagcttcgaccacaggatgatcgacggcgccaccgcccagaaggccctgaaccacatcaagaggctgctgagcgaccccgagctgctgctgatg

SEQ ID NO: 206 - protein, 517 aa, Artificial Sequence
  Description of Artificial Sequence: Synthetic polypeptide
MDWTWILFLVAAATRVHSLRFGIVASRANHALVGGSGGSGGSGGSGGGMDLVLKRCLLHLAVIGALLAVGATKVPRNQDWLGVSRQLRTKAWNRQLYPEWTEAQRLDCWRGGQVSLKVSNDGPTLIGANASFSIALNFPGSQKVLPDGQVIWVNNTIINGSQVWGGQPVYPQETDDACIFPDGGPCPSGSWSQKRSFVYVWKTWGQYWQVLGGPVSGLSIGTGRAMLGTHTMEVTVYHRRGSRSYVPLAHSSSAFTITDQVPFSVSVSQLRALDGGNKHFLRNQPLTFALQLHDPSGYLAEADLSYTWDFGDSSGTLISRALVVTHTYLEPGPVTAQVVLQAAIPLTSCGSSPVPGTTDGHRPTAEAPNTTAGQVPTTEVVGTTPGQAPTAEPSGTTSVQVPTTEVISTAPVQMPTAESTGMTPEKVPVSEVMGTTLAEMSTPEATGMTPAEVSIVVLSGTTAAQVTTTEWVETTARELPIPEPEGPDASSIMSTESITGSLGPLLDGTATLRLVKR

SEQ ID NO: 207 - DNA, 1551 bp, Artificial Sequence
  Description of Artificial Sequence: Synthetic polynucleotide
atggactggacctggatcctgttcctggtggccgccgccaccagggtgcacagcctgaggttcggcatcgtggccagcagggccaaccacgccctggtgggcggcagcggcggcagcggcggcagcggcggcagcggcggcggcatggacctggtgctgaagaggtgcctgctgcacctggccgtgatcggcgccctgctggccgtgggcgccaccaaggtgcccaggaaccaggactggctgggcgtgagcaggcagctgaggaccaaggcctggaacaggcagctgtaccccgagtggaccgaggcccagaggctggactgctggaggggcggccaggtgagcctgaaggtgagcaacgacggccccaccctgatcggcgccaacgccagcttcagcatcgccctgaacttccccggcagccagaaggtgctgcccgacggccaggtgatctgggtgaacaacaccatcatcaacggcagccaggtgtggggcggccagcccgtgtacccccaggagaccgacgacgcctgcatcttccccgacggcggcccctgccccagcggcagctggagccagaagaggagcttcgtgtacgtgtggaagacctggggccagtactggcaggtgctgggcggccccgtgagcggcctgagcatcggcaccggcagggccatgctgggcacccacaccatggaggtgaccgtgtaccacaggaggggcagcaggagctacgtgcccctggcccacagcagcagcgccttcaccatcaccgaccaggtgcccttcagcgtgagcgtgagccagctgagggccctggacggcggcaacaagcacttcctgaggaaccagcccctgaccttcgccctgcagctgcacgaccccagcggctacctggccgaggccgacctgagctacacctgggacttcggcgacagcagcggcaccctgatcagcagggccctggtggtgacccacacctacctggagcccggccccgtgaccgcccaggtggtgctgcaggccgccatccccctgaccagctgcggcagcagccccgtgcccggcaccaccgacggccacaggcccaccgccgaggcccccaacaccaccgccggccaggtgcccaccaccgaggtggtgggcaccacccccggccaggcccccaccgccgagcccagcggcaccaccagcgtgcaggtgcccaccaccgaggtgatcagcaccgcccccgtgcagatgcccaccgccgagagcaccggcatgacccccgagaaggtgcccgtgagcgaggtgatgggcaccaccctggccgagatgagcacccccgaggccaccggcatgacccccgccgaggtgagcatcgtggtgctgagcggcaccaccgccgcccaggtgaccaccaccgagtgggtggagaccaccgccagggagctgcccatccccgagcccgagggccccgacgccagcagcatcatgagcaccgagagcatcaccggcagcctgggccccctgctggacggcaccgccaccctgaggctggtgaagagg

SEQ ID NO: 208 - protein, 285 aa, Artificial Sequence
  Description of Artificial Sequence: Synthetic polypeptide
MDWTWILFLVAAATRVHSLRFGIVASRANHALVGGSGGSGGSGGSGGGIVGGWECEKHSQPWQVLVASRGRAVCGGVLVHPQWVLTAAHCIRNKSVILLGRHSLFHPEDTGQVFQVSHSFPHPLYDMSLLKNRFLRPGDDSSHDLMLLRLSEPAELTDAVKVMDLPTQEPALGTTCYASGWGSIEPEEFLTPKKLQCVDLHVISNDVCAQVHPQKVTKFMLCAGRWTGGKSTCSGDSGGPLVCNGVLQGITSWGSEPCALPERPSLYTKVVHYRKWIKDTIVANP

SEQ ID NO: 209 - DNA, 855 bp, Artificial Sequence
  Description of Artificial Sequence: Synthetic polynucleotide
atggactggacctggatcctgttcctggtggccgccgccaccagggtgcacagcctgaggttcggcatcgtggccagcagggccaaccacgccctggtgggcggcagcggcggcagcggcggcagcggcggcagcggcggcggcatcgtgggcggctgggagtgcgagaagcacagccagccctggcaggtgctggtggccagcaggggcagggccgtgtgcggcggcgtgctggtgcacccccagtgggtgctgaccgccgcccactgcatcaggaacaagagcgtgatcctgctgggcaggcacagcctgttccaccccgaggacaccggccaggtgttccaggtgagccacagcttcccccaccccctgtacgacatgagcctgctgaagaacaggttcctgaggcccggcgacgacagcagccacgacctgatgctgctgaggctgagcgagcccgccgagctgaccgacgccgtgaaggtgatggacctgcccacccaggagcccgccctgggcaccacctgctacgccagcggctggggcagcatcgagcccgaggagttcctgacccccaagaagctgcagtgcgtggacctgcacgtgatcagcaacgacgtgtgcgcccaggtgcacccccagaaggtgaccaagttcatgctgtgcgccggcaggtggaccggcggcaagagcacctgcagcggcgacagcggcggccccctggtgtgcaacggcgtgctgcagggcatcaccagctggggcagcgagccctgcgccctgcccgagaggcccagcctgtacaccaaggtggtgcactacaggaagtggatcaaggacaccatcgtggccaacccc

SEQ ID NO: 210 - protein, 678 aa, Artificial Sequence
  Description of Artificial Sequence: Synthetic polypeptide
MDWTWILFLVAAATRVHSLRFGIVASRANHALVGGSGGSGGSGGSGGGTQVCTGTDMKLRLPASPETHLDMLRHLYQGCQVVQGNLELTYLPTNASLSFLQDIQEVQGYVLIAHNQVRQVPLQRLRIVRGTQLFEDNYALAVLDNGDPLNNTTPVTGASPGGLRELQLRSLTEILKGGVLIQRNPQLCYQDTILWKDIFHKNNQLALTLIDTNRSRACHPCSPMCKGSRCWGESSEDCQSLTRTVCAGGCARCKGPLPTDCCHEQCAAGCTGPKHSDCLACLHFNHSGICELHCPALVTYNTDTFESMPNPEGRYTFGASCVTACPYNYLSTDVGSCTLVCPLHNQEVTAEDGTQRCEKCSKPCARVCYGLGMEHLREVRAVTSANIQEFAGCKKIFGSLAFLPESFDGDPASNTAPLQPEQLQVFETLEEITGYLYISAWPDSLPDLSVFQNLQVIRGRILHNGAYSLTLQGLGISWLGLRSLRELGSGLALIHHNTHLCFVHTVPWDQLFRNPHQALLHTANRPEDECVGEGLACHQLCARGHCWGPGPTQCVNCSQFLRGQECVEECRVLQGLPREYVNARHCLPCHPECQPQNGSVTCFGPEADQCVACAHYKDPPFCVARCPSGVKPDLSYMPIWKFPDEEGACQPCPINCTHSCVDLDDKGCPAEQRASPLT

SEQ ID NO: 211 - DNA, 2034 bp, Artificial Sequence
  Description of Artificial Sequence: Synthetic polynucleotide
atggactggacctggatcctgttcctggtggccgccgccaccagggtgcacagcctgaggttcggcatcgtggccagcagggccaaccacgccctggtgggcggcagcggcggcagcggcggcagcggcggcagcggcggcggcacccaggtgtgcaccggcaccgacatgaagctgaggctgcccgccagccccgagacccacctggacatgctgaggcacctgtaccagggctgccaggtggtgcagggcaacctggagctgacctacctgcccaccaacgccagcctgagcttcctgcaggacatccaggaggtgcagggctacgtgctgatcgcccacaaccaggtgaggcaggtgcccctgcagaggctgaggatcgtgaggggcacccagctgttcgaggacaactacgccctggccgtgctggacaacggcgaccccctgaacaacaccacccccgtgaccggcgccagccccggcggcctgagggagctgcagctgaggagcctgaccgagatcctgaagggcggcgtgctgatccagaggaacccccagctgtgctaccaggacaccatcctgtggaaggacatcttccacaagaacaaccagctggccctgaccctgatcgacaccaacaggagcagggcctgccacccctgcagccccatgtgcaagggcagcaggtgctggggcgagagcagcgaggactgccagagcctgaccaggaccgtgtgcgccggcggctgcgccaggtgcaagggccccctgcccaccgactgctgccacgagcagtgcgccgccggctgcaccggccccaagcacagcgactgcctggcctgcctgcacttcaaccacagcggcatctgcgagctgcactgccccgccctggtgacctacaacaccgacaccttcgagagcatgcccaaccccgagggcaggtacaccttcggcgccagctgcgtgaccgcctgcccctacaactacctgagcaccgacgtgggcagctgcaccctggtgtgccccctgcacaaccaggaggtgaccgccgaggacggcacccagaggtgcgagaagtgcagcaagccctgcgccagggtgtgctacggcctgggcatggagcacctgagggaggtgagggccgtgaccagcgccaacatccaggagttcgccggctgcaagaagatcttcggcagcctggccttcctgcccgagagcttcgacggcgaccccgccagcaacaccgcccccctgcagcccgagcagctgcaggtgttcgagaccctggaggagatcaccggctacctgtacatcagcgcctggcccgacagcctgcccgacctgagcgtgttccagaacctgcaggtgatcaggggcaggatcctgcacaacggcgcctacagcctgaccctgcagggcctgggcatcagctggctgggcctgaggagcctgagggagctgggcagcggcctggccctgatccaccacaacacccacctgtgcttcgtgcacaccgtgccctgggaccagctgttcaggaacccccaccaggccctgctgcacaccgccaacaggcccgaggacgagtgcgtgggcgagggcctggcctgccaccagctgtgcgccaggggccactgctggggccccggccccacccagtgcgtgaactgcagccagttcctgaggggccaggagtgcgtggaggagtgcagggtgctgcagggcctgcccagggagtacgtgaacgccaggcactgcctgccctgccaccccgagtgccagccccagaacggcagcgtgacctgcttcggccccgaggccgaccagtgcgtggcctgcgcccactacaaggacccccccttctgcgtggccaggtgccccagcggcgtgaagcccgacctgagctacatgcccatctggaagttccccgacgaggagggcgcctgccagccctgccccatcaactgcacccacagctgcgtggacctggacgacaagggctgccccgccgagcagagggccagccccctgacc

SEQ ID NO: 212 - protein, 15 aa, Unknown
  Description of Unknown: Epitope sequence
DAVIAIGVLCRGATP

SEQ ID NO: 213 - protein, 15 aa, Unknown
  Description of Unknown: Epitope sequence
ATPSFDYIASEVSKG

SEQ ID NO: 214 - protein, 15 aa, Unknown
  Description of Unknown: Epitope sequence
TRQGGYSNDNTVIFR

SEQ ID NO: 215 - protein, 15 aa, Unknown
  Description of Unknown: Epitope sequence
ARCQIAGTVVSTQLF

SEQ ID NO: 216 - protein, 15 aa, Unknown
  Description of Unknown: Epitope sequence
LKFGIVGSRFNHGLV

SEQ ID NO: 217 - protein, 15 aa, Unknown
  Description of Unknown: Epitope sequence
AALCAIEMANLFKSL

SEQ ID NO: 218 - protein, 13 aa, Artificial Sequence
  Description of Artificial Sequence: Synthetic peptide
AKFVAAWTLKAAA

SEQ ID NO: 219 - protein, 48 aa, Artificial Sequence
  Description of Artificial Sequence: Synthetic polypeptide
MDWTWILFLVAAATRVHSLRFGIVASRANHALVGGSGGSGGSGGSGGG
